(19) United States
(12) Patent Application Publication
(10) Pub. No.: US 2004/0258678 A1
(43) Pub. Date: Dec. 23, 2004

(54) Compositions and methods for the treatment of immune related diseases

(75) Inventors: Sarah C. Bodary, Palo Alto, CA (US); Hilary Clark, San Francisco, CA (US); Brisdell Hunte, San Francisco, CA (US); Janet K. Jackman, Half Moon Bay, CA (US); Jill R. Schoenfeld, Ashland, OR (US); P. Mickey Williams, Half Moon Bay, CA (US); William I. Wood, Hillsborough, CA (US); Thomas D. Wu, San Francisco, CA (US)

Correspondence Address: GENENTECH, INC., 1 DNA WAY, SOUTH SAN FRANCISCO, CA, 94080, US

(73) Assignee: Genentech, Inc., South San Francisco, CA

(21) Appl. No.: 10/370,715

(22) Filed: Feb. 21, 2003

Related U.S. Application Data
(60) Provisional application No. 60/359,461, filed on Feb. 22, 2002.

(51) Int. Cl. A61K 39/395; C07H 21/04; C12N 9/00

(52) U.S. Cl. 424/130.1; 435/69.1; 435/183; 435/320.1; 435/325; 530/350; 536/23.2; 530/388.1

(57) ABSTRACT

The present invention relates to compositions containing novel proteins and methods of using those compositions for the diagnosis and treatment of immune related diseases.

### FIELD OF THE INVENTION

[0001] The present invention relates to compositions and methods useful for the diagnosis and treatment of immune related diseases.

### BACKGROUND OF THE INVENTION

[0002] Immune related and inflammatory diseases are the manifestation or consequence of fairly complex, often multiple interconnected biological pathways which in normal physiology are critical to respond to insult or injury, initiate repair from insult or injury, and mount innate and acquired defense against foreign organisms. Disease or pathology occurs when these normal physiological pathways cause additional insult or injury either as directly related to the intensity of the response, as a consequence of abnormal regulation or excessive stimulation, as a reaction to self, or as a combination of these.

[0003] Though the genesis of these diseases often involves multistep pathways and often multiple different biological systems/pathways, intervention at critical points in one or more of these pathways can have an ameliorative or therapeutic effect. Therapeutic intervention can occur by either antagonism of a detrimental process/pathway or stimulation of a beneficial process/pathway.

[0004] Many immune related diseases are known and have been extensively studied. Such diseases include immune-mediated inflammatory diseases, non-immune-mediated inflammatory diseases, infectious diseases, immunodeficiency diseases, neoplasia, etc.

[0005] T lymphocytes (T cells) are an important component of a mammalian immune response. T cells recognize antigens which are associated with a self-molecule encoded by genes within the major histocompatibility complex (MHC). The antigen may be displayed together with MHC molecules on the surface of antigen presenting cells, virus infected cells, cancer cells, grafts, etc. The T cell system eliminates these altered cells which pose a health threat to the host mammal. T cells include helper T cells and cytotoxic T cells. Helper T cells proliferate extensively following recognition of an antigen -MHC complex on an antigen presenting cell. Helper T cells also secrete a variety of cytokines, i.e., lymphokines, which play a central role in the activation of B cells, cytotoxic T cells and a variety of other cells which participate in the immune response.

[0006] Immune related diseases could be treated by suppressing the immune response. Using neutralizing antibodies that inhibit molecules having immune stimulatory activity would be beneficial in the treatment of immune-mediated and inflammatory diseases. Molecules which inhibit the immune response can be utilized (proteins directly or via the use of antibody agonists) to inhibit the immune response and thus ameliorate immune related disease.

[0007] CD4+ T cells are known to be important regulators of inflammation. Herein, CD4+ T cells were activated and the profile of genes differentially expressed upon activation was analyzed. As such, the activation specific genes may be potential therapeutic targets. In vivo co-stimulation is necessary for a productive immune proliferative response. The list of costimulatory molecules is quite extensive and it is still unclear just which co-stimulatory molecules play critical roles in different types and stages of inflammation. In this application the focus is on genes which are specifically upregulated by stimulation with ICAM, anti-CD28 or ICAM/anti-CD28 in combination and may be useful in targeting inflammatory processes which are associated with these different molecules.

### SUMMARY OF THE INVENTION

### A. Embodiments

[0008] The present invention concerns compositions and methods useful for the diagnosis and treatment of immune related disease in mammals, including humans. The present invention is based on the identification of proteins (including agonist and antagonist antibodies) which are a result of stimulation of the immune response in mammals. Immune related diseases can be treated by suppressing or enhancing the immune response. Molecules that enhance the immune response stimulate or potentiate the immune response to an antigen. Molecules which stimulate the immune response can be used therapeutically where enhancement of the immune response would be beneficial. Alternatively, molecules that suppress the immune response attenuate or reduce the immune response to an antigen (e.g., neutralizing antibodies) can be used therapeutically where attenuation of the immune response would be beneficial (e.g., inflammation). Accordingly, the PRO polypeptides, agonists and antagonists thereof are also useful to prepare medicines and medicaments for the treatment of immune-related and inflammatory diseases. In a specific aspect, such medicines and medicaments comprise a therapeutically effective amount of a PRO polypeptide, agonist or antagonist thereof with a pharmaceutically acceptable carrier. Preferably, the admixture is sterile.

[0009] In a further embodiment, the invention concerns a method of identifying agonists or antagonists to a PRO polypeptide which comprises contacting the PRO polypeptide with a candidate molecule and monitoring a biological activity mediated by said PRO polypeptide. Preferably, the PRO polypeptide is a native sequence PRO polypeptide. In a specific aspect, the PRO agonist or antagonist is an anti-PRO antibody.

[0010] In another embodiment, the invention concerns a composition of matter comprising a PRO polypeptide or an agonist or antagonist antibody which binds the polypeptide in admixture with a carrier or excipient. In one aspect, the composition comprises a therapeutically effective amount of the polypeptide or antibody. In another aspect, when the composition comprises an immune stimulating molecule, the composition is useful for: (a) increasing infiltration of inflammatory cells into a tissue of a mammal in need thereof, (b) stimulating or enhancing an immune response in a mammal in need thereof, (c) increasing the proliferation of T-lymphocytes in a mammal in need thereof in response to an antigen, (d) stimulating the activity of T-lymphocytes or (e) increasing the vascular permeability. In a further aspect, when the composition comprises an immune inhibiting molecule, the composition is useful for: (a) decreasing infiltration of inflammatory cells into a tissue of a mammal in need thereof, (b) inhibiting or reducing an immune response in a mammal in need thereof, (c) decreasing the activity of T-lymphocytes or (d) decreasing the proliferation of T-lymphocytes in a mammal in need thereof in response to an antigen. In another aspect, the composition comprises a further active ingredient, which may, for example, be a further antibody or a cytotoxic or chemotherapeutic agent. Preferably, the composition is sterile.

[0011] In another embodiment, the invention concerns a method of treating an immune related disorder in a mammal in need thereof, comprising administering to the mammal an effective amount of a PRO polypeptide, an agonist thereof, or an antagonist thereto. In a preferred aspect, the immune related disorder is selected from the group consisting of: systemic lupus erythematosis, rheumatoid arthritis, osteoarthritis, juvenile chronic arthritis, spondyloarthropathies, systemic sclerosis, idiopathic inflammatory myopathies, Sjögren's syndrome, systemic vasculitis, sarcoidosis, autoimmune hemolytic anemia, autoimmune thrombocytopenia, thyroiditis, diabetes mellitus, immune-mediated renal disease, demyelinating diseases of the central and peripheral nervous systems such as multiple sclerosis, idiopathic demyelinating polyneuropathy or Guillain-Barré syndrome, and chronic inflammatory demyelinating polyneuropathy, hepatobiliary diseases such as infectious, autoimmune chronic active hepatitis, primary biliary cirrhosis, granulomatous hepatitis, and sclerosing cholangitis, inflammatory bowel disease, gluten-sensitive enteropathy, and Whipple's disease, autoimmune or immune-mediated skin diseases including bullous skin diseases, erythema multiforme and contact dermatitis, psoriasis, allergic diseases such as asthma, allergic rhinitis, atopic dermatitis, food hypersensitivity and urticaria, immunologic diseases of the lung such as eosinophilic pneumonias, idiopathic pulmonary fibrosis and hypersensitivity pneumonitis, transplantation associated diseases including graft rejection and graft-versus-host-disease.

[0012] In another embodiment, the invention provides an antibody which specifically binds to any of the above or below described polypeptides. Optionally, the antibody is a monoclonal antibody, humanized antibody, antibody fragment or single-chain antibody. In one aspect, the present invention concerns an isolated antibody which binds a PRO polypeptide. In another aspect, the antibody mimics the activity of a PRO polypeptide (an agonist antibody) or conversely the antibody inhibits or neutralizes the activity of a PRO polypeptide (an antagonist antibody). In another aspect, the antibody is a monoclonal antibody, which preferably has nonhuman complementarity determining region (CDR) residues and human framework region (FR) residues. The antibody may be labeled and may be immobilized on a solid support. In a further aspect, the antibody is an antibody fragment, a monoclonal antibody, a single-chain antibody, or an anti-idiotypic antibody.

[0013] In yet another embodiment, the present invention provides a composition comprising an anti-PRO antibody in admixture with a pharmaceutically acceptable carrier. In one aspect, the composition comprises a therapeutically effective amount of the antibody. Preferably, the composition is sterile. The composition may be administered in the form of a liquid pharmaceutical formulation, which may be preserved to achieve extended storage stability. Alternatively, the antibody is a monoclonal antibody, an antibody fragment, a humanized antibody, or a single-chain antibody.

[0014] In a further embodiment, the invention concerns an article of manufacture, comprising:

[0015] (a) a composition of matter comprising a PRO polypeptide or agonist or antagonist thereof;

[0016] (b) a container containing said composition; and

[0017] (c) a label affixed to said container, or a package insert included in said container referring to the use of said PRO polypeptide or agonist or antagonist thereof in the treatment of an immune related disease. The composition may comprise a therapeutically effective amount of the PRO polypeptide or the agonist or antagonist thereof.

[0018] In yet another embodiment, the present invention concerns a method of diagnosing an immune related disease in a mammal, comprising detecting the level of expression of a gene encoding a PRO polypeptide (a) in a test sample of tissue cells obtained from the mammal, and (b) in a control sample of known normal tissue cells of the same cell type, wherein a higher or lower expression level in the test sample as compared to the control sample indicates the presence of immune related disease in the mammal from which the test tissue cells were obtained.

[0019] In another embodiment, the present invention concerns a method of diagnosing an immune disease in a mammal, comprising (a) contacting an anti-PRO antibody with a test sample of tissue cells obtained from the mammal, and (b) detecting the formation of a complex between the antibody and a PRO polypeptide, in the test sample; wherein the formation of said complex is indicative of the presence or absence of said disease. The detection may be qualitative or quantitative, and may be performed in comparison with monitoring the complex formation in a control sample of known normal tissue cells of the same cell type. A larger quantity of complexes formed in the test sample indicates the presence or absence of an immune disease in the mammal from which the test tissue cells were obtained. The antibody preferably carries a detectable label. Complex formation can be monitored, for example, by light microscopy, flow cytometry, fluorimetry, or other techniques known in the art. The test sample is usually obtained from an individual suspected of having a deficiency or abnormality of the immune system.

[0020] In another embodiment, the invention provides a method for determining the presence of a PRO polypeptide in a sample comprising exposing a test sample of cells suspected of containing the PRO polypeptide to an anti-PRO antibody and determining the binding of said antibody to said cell sample. In a specific aspect, the sample comprises a cell suspected of containing the PRO polypeptide and the antibody binds to the cell. The antibody is preferably detectably labeled and/or bound to a solid support.

[0021] In another embodiment, the present invention concerns an immune-related disease diagnostic kit, comprising an anti-PRO antibody and a carrier in suitable packaging. The kit preferably contains instructions for using the antibody to detect the presence of the PRO polypeptide. Preferably the carrier is pharmaceutically acceptable.

[0022] In another embodiment, the present invention concerns a diagnostic kit, containing an anti-PRO antibody in suitable packaging. The kit preferably contains instructions for using the antibody to detect the PRO polypeptide.

[0023] In another embodiment, the invention provides a method of diagnosing an immune-related disease in a mammal which comprises detecting the presence or absence or a PRO polypeptide in a test sample of tissue cells obtained from said mammal, wherein the presence or absence of the PRO polypeptide in said test sample is indicative of the presence of an immune-related disease in said mammal.

[0024] In another embodiment, the present invention concerns a method for identifying an agonist of a PRO polypeptide comprising:

[0025] (a) contacting cells and a test compound to be screened under conditions suitable for the induction of a cellular response normally induced by a PRO polypeptide; and

[0026] (b) determining the induction of said cellular response to determine if the test compound is an effective agonist, wherein the induction of said cellular response is indicative of said test compound being an effective agonist.

[0027] In another embodiment, the invention concerns a method for identifying a compound capable of inhibiting the activity of a PRO polypeptide comprising contacting a candidate compound with a PRO polypeptide under conditions and for a time sufficient to allow these two components to interact and determining whether the activity of the PRO polypeptide is inhibited. In a specific aspect, either the candidate compound or the PRO polypeptide is immobilized on a solid support. In another aspect, the non-immobilized component carries a detectable label. In a preferred aspect, this method comprises the steps of:

[0028] (a) contacting cells and a test compound to be screened in the presence of a PRO polypeptide under conditions suitable for the induction of a cellular response normally induced by a PRO polypeptide; and

[0029] (b) determining the induction of said cellular response to determine if the test compound is an effective antagonist.

[0030] In another embodiment, the invention provides a method for identifying a compound that inhibits the expression of a PRO polypeptide in cells that normally express the polypeptide, wherein the method comprises contacting the cells with a test compound and determining whether the expression of the PRO polypeptide is inhibited. In a preferred aspect, this method comprises the steps of:

[0031] (a) contacting cells and a test compound to be screened under conditions suitable for allowing expression of the PRO polypeptide; and

[0032] (b) determining the inhibition of expression of said polypeptide.

[0033] In yet another embodiment, the present invention concerns a method for treating an immune-related disorder in a mammal that suffers therefrom comprising administering to the mammal a nucleic acid molecule that codes for either (a) a PRO polypeptide, (b) an agonist of a PRO polypeptide or (c) an antagonist of a PRO polypeptide, wherein said agonist or antagonist may be an anti-PRO antibody. In a preferred embodiment, the mammal is human. In another preferred embodiment, the nucleic acid is administered via ex vivo gene therapy. In a further preferred embodiment, the nucleic acid is comprised within a vector, more preferably an adenoviral, adeno-associated viral, lentiviral or retroviral vector.

[0034] In yet another aspect, the invention provides a recombinant viral particle comprising a viral vector consisting essentially of a promoter, nucleic acid encoding (a) a PRO polypeptide, (b) an agonist polypeptide of a PRO polypeptide, or (c) an antagonist polypeptide of a PRO polypeptide, and a signal sequence for cellular secretion of the polypeptide, wherein the viral vector is in association with viral structural proteins. Preferably, the signal sequence is from a mammal, such as from a native PRO polypeptide.

[0035] In a still further embodiment, the invention concerns an ex vivo producer cell comprising a nucleic acid construct that expresses retroviral structural proteins and also comprises a retroviral vector consisting essentially of a promoter, nucleic acid encoding (a) a PRO polypeptide, (b) an agonist polypeptide of a PRO polypeptide or (c) an antagonist polypeptide of a PRO polypeptide, and a signal sequence for cellular secretion of the polypeptide, wherein said producer cell packages the retroviral vector in association with the structural proteins to produce recombinant retroviral particles.

[0036] In a still further embodiment, the invention provides a method of increasing the activity of T-lymphocytes in a mammal comprising administering to said mammal (a) a PRO polypeptide, (b) an agonist of a PRO polypeptide, or (c) an antagonist of a PRO polypeptide, wherein the activity of T-lymphocytes in the mammal is increased.

[0037] In a still further embodiment, the invention provides a method of decreasing the activity of T-lymphocytes in a mammal comprising administering to said mammal (a) a PRO polypeptide, (b) an agonist of a PRO polypeptide, or (c) an antagonist of a PRO polypeptide, wherein the activity of T-lymphocytes in the mammal is decreased.

[0038] In a still further embodiment, the invention provides a method of increasing the proliferation of T-lymphocytes in a mammal comprising administering to said mammal (a) a PRO polypeptide, (b) an agonist of a PRO polypeptide, or (c) an antagonist of a PRO polypeptide, wherein the proliferation of T-lymphocytes in the mammal is increased.

[0039] In a still further embodiment, the invention provides a method of decreasing the proliferation of T-lymphocytes in a mammal comprising administering to said mammal (a) a PRO polypeptide, (b) an agonist of a PRO polypeptide, or (c) an antagonist of a PRO polypeptide, wherein the proliferation of T-lymphocytes in the mammal is decreased.

### B. Additional Embodiments

[0040] In other embodiments of the present invention, the invention provides vectors comprising DNA encoding any of the herein described polypeptides. Host cell comprising any such vector are also provided. By way of example, the host cells may be CHO cells, E. coli, or yeast. A process for producing any of the herein described polypeptides is further provided and comprises culturing host cells under conditions suitable for expression of the desired polypeptide and recovering the desired polypeptide from the cell culture.

[0041] In other embodiments, the invention provides chimeric molecules comprising any of the herein described polypeptides fused to a heterologous polypeptide or amino acid sequence. Example of such chimeric molecules comprise any of the herein described polypeptides fused to an epitope tag sequence or a Fc region of an immunoglobulin.

[0042] In another embodiment, the invention provides an antibody which specifically binds to any of the above or below described polypeptides. Optionally, the antibody is a monoclonal antibody, humanized antibody, antibody fragment or single-chain antibody.

[0043] In yet other embodiments, the invention provides oligonucleotide probes useful for isolating genomic and cDNA nucleotide sequences or as antisense probes, wherein those probes may be derived from any of the above or below described nucleotide sequences.

[0044] In other embodiments, the invention provides an isolated nucleic acid molecule comprising a nucleotide sequence that encodes a PRO polypeptide.

[0045] In one aspect, the isolated nucleic acid molecule comprises a nucleotide sequence having at least about 80% nucleic acid sequence identity, alternatively at least about 81% nucleic acid sequence identity, alternatively at least about 82% nucleic acid sequence identity, alternatively at least about 83% nucleic acid sequence identity, alternatively at least about 84% nucleic acid sequence identity, alternatively at least about 85% nucleic acid sequence identity, alternatively at least about 86% nucleic acid sequence identity, alternatively at least about 87% nucleic acid sequence identity, alternatively at least about 88% nucleic acid sequence identity, alternatively at least about 89% nucleic acid sequence identity, alternatively at least about 90% nucleic acid sequence identity, alternatively at least about 91% nucleic acid sequence identity, alternatively at least about 92% nucleic acid sequence identity, alternatively at least about 93% nucleic acid sequence identity, alternatively at least about 94% nucleic acid sequence identity, alternatively at least about 95% nucleic acid sequence identity, alternatively at least about 96% nucleic acid sequence identity, alternatively at least about 97% nucleic acid sequence identity, alternatively at least about 98% nucleic acid sequence identity and alternatively at least about 99% nucleic acid sequence identity to (a) a DNA molecule encoding a PRO polypeptide having a full-length amino acid sequence as disclosed herein, an amino acid sequence lacking the signal peptide as disclosed herein, an extracellular domain of a transmembrane protein, with or without the signal peptide, as disclosed herein or any other specifically defined fragment of the full-length amino acid sequence as disclosed herein, or (b) the complement of the DNA molecule of (a).

[0046] In other aspects, the isolated nucleic acid molecule comprises a nucleotide sequence having at least about 80% nucleic acid sequence identity, alternatively at least about 81% nucleic acid sequence identity, alternatively at least about 82% nucleic acid sequence identity, alternatively at least about 83% nucleic acid sequence identity, alternatively at least about 84% nucleic acid sequence identity, alternatively at least about 85% nucleic acid sequence identity, alternatively at least about 86% nucleic acid sequence identity, alternatively at least about 87% nucleic acid sequence identity, alternatively at least about 88% nucleic acid sequence identity, alternatively at least about 89% nucleic acid sequence identity, alternatively at least about 90% nucleic acid sequence identity, alternatively at least about 91% nucleic acid sequence identity, alternatively at least about 92% nucleic acid sequence identity, alternatively at least about 93% nucleic acid sequence identity, alternatively at least about 94% nucleic acid sequence identity, alternatively at least about 95% nucleic acid sequence identity, alternatively at least about 96% nucleic acid sequence identity, alternatively at least about 97% nucleic acid sequence identity, alternatively at least about 98% nucleic acid sequence identity and alternatively at least about 99% nucleic acid sequence identity to (a) a DNA molecule comprising the coding sequence of a full-length PRO polypeptide cDNA as disclosed herein, the coding sequence of a PRO polypeptide lacking the signal peptide as disclosed herein, the coding sequence of an extracellular domain of a transmembrane PRO polypeptide, with or without the signal peptide, as disclosed herein or the coding sequence of any other specifically defined fragment of the full-length amino acid sequence as disclosed herein, or (b) the complement of the DNA molecule of (a).

[0047] In a further aspect, the invention concerns an isolated nucleic acid molecule comprising a nucleotide sequence having at least about 80% nucleic acid sequence identity, alternatively at least about 81% nucleic acid sequence identity, alternatively at least about 82% nucleic acid sequence identity, alternatively at least about 83% nucleic acid sequence identity, alternatively at least about 84% nucleic acid sequence identity, alternatively at least about 85% nucleic acid sequence identity, alternatively at least about 86% nucleic acid sequence identity, alternatively at least about 87% nucleic acid sequence identity, alternatively at least about 88% nucleic acid sequence identity, alternatively at least about 89% nucleic acid sequence identity, alternatively at least about 90% nucleic acid sequence identity, alternatively at least about 91% nucleic acid sequence identity, alternatively at least about 92% nucleic acid sequence identity, alternatively at least about 93% nucleic acid sequence identity, alternatively at least about 94% nucleic acid sequence identity, alternatively at least about 95% nucleic acid sequence identity, alternatively at least about 96% nucleic acid sequence identity, alternatively at least about 97% nucleic acid sequence identity, alternatively at least about 98% nucleic acid sequence identity and alternatively at least about 99% nucleic acid sequence identity to (a) a DNA molecule that encodes the same mature polypeptide encoded by any of the human protein cDNAs deposited with the ATCC as disclosed herein, or (b) the complement of the DNA molecule of (a).

[0048] Another aspect the invention provides an isolated nucleic acid molecule comprising a nucleotide sequence encoding a PRO polypeptide which is either transmembrane domain-deleted or transmembrane domain-inactivated, or is complementary to such encoding nucleotide sequence, wherein the transmembrane domain(s) of such polypeptide are disclosed herein. Therefore, soluble extracellular domains of the herein described PRO polypeptides are contemplated.

[0049] Another embodiment is directed to fragments of a PRO polypeptide coding sequence, or the complement thereof, that may find use as, for example, hybridization probes, for encoding fragments of a PRO polypeptide that may optionally encode a polypeptide comprising a binding site for an anti-PRO antibody or as antisense oligonucleotide probes. Such nucleic acid fragments are usually at least about 20 nucleotides in length, alternatively at least about 30 nucleotides in length, alternatively at least about 40 nucleotides in length, alternatively at least about 50 nucleotides in length, alternatively at least about 60 nucleotides in length, alternatively at least about 70 nucleotides in length, alternatively at least about 80 nucleotides in length, alternatively at least about 90 nucleotides in length, alternatively at least about 100 nucleotides in length, alternatively at least about 110 nucleotides in length, alternatively at least about 120 nucleotides in length, alternatively at least about 130 nucleotides in length, alternatively at least about 140 nucleotides in length, alternatively at least about 150 nucleotides in length, alternatively at least about 160 nucleotides in length, alternatively at least about 170 nucleotides in length, alternatively at least about 180 nucleotides in length, alternatively at least about 190 nucleotides in length, alternatively at least about 200 nucleotides in length, alternatively at least about 250 nucleotides in length, alternatively at least about 300 nucleotides in length, alternatively at least about 350 nucleotides in length, alternatively at least about 400 nucleotides in length, alternatively at least about 450 nucleotides in length, alternatively at least about 500 nucleotides in length, alternatively at least about 600 nucleotides in length, alternatively at least about 700 nucleotides in length, alternatively at least about 800 nucleotides in length, alternatively at least about 900 nucleotides in length and alternatively at least about 1000 nucleotides in length, wherein in this context the term “about” means the referenced nucleotide sequence length plus or minus 10% of that referenced length. It is noted that novel fragments of a PRO polypeptide-encoding nucleotide sequence may be determined in a routine manner by aligning the PRO polypeptide-encoding nucleotide sequence with other known nucleotide sequences using any of a number of well known sequence alignment programs and determining which PRO polypeptide-encoding nucleotide sequence fragment(s) are novel. All of such PRO polypeptide-encoding nucleotide sequences are contemplated herein. Also contemplated are the PRO polypeptide fragments encoded by these nucleotide molecule fragments, preferably those PRO polypeptide fragments that comprise a binding site for an anti-PRO antibody.

[0050] In another embodiment, the invention provides isolated PRO polypeptide encoded by any of the isolated nucleic acid sequences herein above identified.

[0051] In a certain aspect, the invention concerns an isolated PRO polypeptide, comprising an amino acid sequence having at least about 80% amino acid sequence identity, alternatively at least about 81% amino acid sequence identity, alternatively at least about 82% amino acid sequence identity, alternatively at least about 83% amino acid sequence identity, alternatively at least about 84% amino acid sequence identity, alternatively at least about 85% amino acid sequence identity, alternatively at least about 86% amino acid sequence identity, alternatively at least about 87% amino acid sequence identity, alternatively at least about 88% amino acid sequence identity, alternatively at least about 89% amino acid sequence identity, alternatively at least about 90% amino acid sequence identity, alternatively at least about 91% amino acid sequence identity, alternatively at least about 92% amino acid sequence identity, alternatively at least about 93% amino acid sequence identity, alternatively at least about 94% amino acid sequence identity, alternatively at least about 95% amino acid sequence identity, alternatively at least about 96% amino acid sequence identity, alternatively at least about 97% amino acid sequence identity, alternatively at least about 98% amino acid sequence identity and alternatively at least about 99% amino acid sequence identity to a PRO polypeptide having a full-length amino acid sequence as disclosed herein, an amino acid sequence lacking the signal peptide as disclosed herein, an extracellular domain of a transmembrane protein, with or without the signal peptide, as disclosed herein or any other specifically defined fragment of the full-length amino acid sequence as disclosed herein.

[0052] In a further aspect, the invention concerns an isolated PRO polypeptide comprising an amino acid sequence having at least about 80% amino acid sequence identity, alternatively at least about 81% amino acid sequence identity, alternatively at least about 82% amino acid sequence identity, alternatively at least about 83% amino acid sequence identity, alternatively at least about 84% amino acid sequence identity, alternatively at least about 85% amino acid sequence identity, alternatively at least about 86% amino acid sequence identity, alternatively at least about 87% amino acid sequence identity, alternatively at least about 88% amino acid sequence identity, alternatively at least about 89% amino acid sequence identity, alternatively at least about 90% amino acid sequence identity, alternatively at least about 91% amino acid sequence identity, alternatively at least about 92% amino acid sequence identity, alternatively at least about 93% amino acid sequence identity, alternatively at least about 94% amino acid sequence identity, alternatively at least about 95% amino acid sequence identity, alternatively at least about 96% amino acid sequence identity, alternatively at least about 97% amino acid sequence identity, alternatively at least about 98% amino acid sequence identity and alternatively at least about 99% amino acid sequence identity to an amino acid sequence encoded by any of the human protein cDNAs deposited with the ATCC as disclosed herein.

[0053] In a specific aspect, the invention provides an isolated PRO polypeptide without the N-terminal signal sequence and/or the initiating methionine and is encoded by a nucleotide sequence that encodes such an amino acid sequence as herein before described. Processes for producing the same are also herein described, wherein those processes comprise culturing a host cell comprising a vector which comprises the appropriate encoding nucleic acid molecule under conditions suitable for expression of the PRO polypeptide and recovering the PRO polypeptide from the cell culture.

[0054] Another aspect the invention provides an isolated PRO polypeptide which is either transmembrane domain-deleted or transmembrane domain-inactivated. Processes for producing the same are also herein described, wherein those processes comprise culturing a host cell comprising a vector which comprises the appropriate encoding nucleic acid molecule under conditions suitable for expression of the PRO polypeptide and recovering the PRO polypeptide from the cell culture.

[0055] In yet another embodiment, the invention concerns agonists and antagonists of a native PRO polypeptide as defined herein. In a particular embodiment, the agonist or antagonist is an anti-PRO antibody or a small molecule.

[0056] In a further embodiment, the invention concerns a method of identifying agonists or antagonists to a PRO polypeptide which comprise contacting the PRO polypeptide with a candidate molecule and monitoring a biological activity mediated by said PRO polypeptide. Preferably, the PRO polypeptide is a native PRO polypeptide.

[0057] In a still further embodiment, the invention concerns a composition of matter comprising a PRO polypeptide, or an agonist or antagonist of a PRO polypeptide as herein described, or an anti-PRO antibody, in combination with a carrier. Optionally, the carrier is a pharmaceutically acceptable carrier.

[0058] Another embodiment of the present invention is directed to the use of a PRO polypeptide, or an agonist or antagonist thereof as herein before described, or an anti-PRO antibody, for the preparation of a medicament useful in the treatment of a condition which is responsive to the PRO polypeptide, an agonist or antagonist thereof or an anti-PRO antibody.

### BRIEF DESCRIPTION OF THE DRAWINGS

[0059] FIG. 1 shows a nucleotide sequence (SEQ ID NO:1) of a native sequence PRO69457 cDNA, wherein SEQ ID NO:1 is a clone designated herein as “DNA287163”.

[0060] FIG. 2 shows the amino acid sequence (SEQ ID NO:2) derived from the coding sequence of SEQ ID NO:1 shown in FIG. 1.

[0061] FIG. 3 shows a nucleotide sequence (SEQ ID NO:3) of a native sequence PRO69458 cDNA, wherein SEQ ID NO:3 is a clone designated herein as “DNA287164”.

[0062] FIG. 4 shows the amino acid sequence (SEQ ID NO:4) derived from the coding sequence of SEQ ID NO:3 shown in FIG. 3.

[0063] FIG. 5 shows a nucleotide sequence (SEQ ID NO:5) of a native sequence PRO52268 cDNA, wherein SEQ ID NO:5 is a clone designated herein as “DNA287165”.

[0064] FIG. 6 shows the amino acid sequence (SEQ ID NO:6) derived from the coding sequence of SEQ ID NO:5 shown in FIG. 5.

[0065] FIG. 7 shows a nucleotide sequence (SEQ ID NO:7) of a native sequence PRO69459 cDNA, wherein SEQ ID NO:7 is a clone designated herein as “DNA287166”.

[0066] FIG. 8 shows the amino acid sequence (SEQ ID NO:8) derived from the coding sequence of SEQ ID NO:7 shown in FIG. 7.

[0067] FIG. 9 shows a nucleotide sequence (SEQ ID NO:9) of a native sequence PRO62927 cDNA, wherein SEQ ID NO:9 is a clone designated herein as “DNA275240”.

[0068] FIG. 10 shows the amino acid sequence (SEQ ID NO:10) derived from the coding sequence of SEQ ID NO:9 shown in FIG. 9.

[0069] FIG. 11 shows a nucleotide sequence (SEQ ID NO:11) of a native sequence PRO59136 cDNA, wherein SEQ ID NO:11 is a clone designated herein as “DNA287167”.

[0070] FIG. 12 shows the amino acid sequence (SEQ ID NO:12) derived from the coding sequence of SEQ ID NO:11 shown in FIG. 11.

[0071] FIG. 13 shows a nucleotide sequence (SEQ ID NO:13) of a native sequence PRO37121 cDNA, wherein SEQ ID NO:13 is a clone designated herein as “DNA226658”.

[0072] FIG. 14 shows the amino acid sequence (SEQ ID NO:14) derived from the coding sequence of SEQ ID NO:14 shown in FIG. 14.

[0073] FIG. 15 shows a nucleotide sequence (SEQ ID NO:15) of a native sequence PRO69460 cDNA, wherein SEQ ID NO:15 is a clone designated herein as “DNA287168”.

[0074] FIG. 16 shows the amino acid sequence (SEQ ID NO:16) derived from the coding sequence of SEQ ID NO:15 shown in FIG. 15.

[0075] FIG. 17 shows a nucleotide sequence (SEQ ID NO:17) of a native sequence PRO60475 cDNA, wherein SEQ ID NO:17 is a clone designated herein as “DNA272213”.

[0076] FIG. 18 shows the amino acid sequence (SEQ ID NO:18) derived from the coding sequence of SEQ ID NO:17 shown in FIG. 17.

[0077] FIG. 19 shows a nucleotide sequence (SEQ ID NO:19) of a native sequence PRO34451 cDNA, wherein SEQ ID NO:19 is a clone designated herein as “DNA218655”.

[0078] FIG. 20 shows the amino acid sequence (SEQ ID NO:20) derived from the coding sequence of SEQ ID NO:19 shown in FIG. 19.

[0079] FIG. 21 shows a nucleotide sequence (SEQ ID NO:21) of a native sequence PRO38070 cDNA, wherein SEQ ID NO:21 is a clone designated herein as “DNA227607”.

[0080] FIG. 22 shows the amino acid sequence (SEQ ID NO:22) derived from the coding sequence of SEQ ID NO:21 shown in FIG. 21.

[0081] FIG. 23 shows a nucleotide sequence (SEQ ID NO:23) of a native sequence PRO23756 cDNA, wherein SEQ ID NO:23 is a clone designated herein as “DNA194378”.

[0082] FIG. 24 shows the amino acid sequence (SEQ ID NO:24) derived from the coding sequence of SEQ ID NO:23 shown in FIG. 23.

[0083] FIG. 25 shows a nucleotide sequence (SEQ ID NO:25) of a native sequence PRO10404 cDNA, wherein SEQ ID NO:25 is a clone designated herein as “DNA287169”.

[0084] FIG. 26 shows the amino acid sequence (SEQ ID NO:26) derived from the coding sequence of SEQ ID NO:25 shown in FIG. 25.

[0085] FIG. 27 shows a nucleotide sequence (SEQ ID NO:27) of a native sequence PRO69461 cDNA, wherein SEQ ID NO:27 is a clone designated herein as “DNA288240”.

[0086] FIG. 28 shows the amino acid sequence (SEQ ID NO:28) derived from the coding sequence of SEQ ID NO:27 shown in FIG. 27.

[0087] FIG. 29 shows a nucleotide sequence (SEQ ID NO:29) of a native sequence PRO70006 cDNA, wherein SEQ ID NO:29 is a clone designated herein as “DNA288241”.

[0088] FIG. 30 shows the amino acid sequence (SEQ ID NO:30) derived from the coding sequence of SEQ ID NO:29 shown in FIG. 29.

[0089] FIG. 31 shows a nucleotide sequence (SEQ ID NO:31) of a native sequence PRO69462 cDNA, wherein SEQ ID NO:31 is a clone designated herein as “DNA287171”.

[0090] FIG. 32 shows the amino acid sequence (SEQ ID NO:32) derived from the coding sequence of SEQ ID NO:31 shown in FIG. 31.

[0091] FIG. 33 shows a nucleotide sequence (SEQ ID NO:33) of a native sequence PRO2081 cDNA, wherein SEQ ID NO:33 is a clone designated herein as “DNA287620”.

[0092] FIG. 34 shows the amino acid sequence (SEQ ID NO:34) derived from the coding sequence of SEQ ID NO:33 shown in FIG. 33.

[0093] FIG. 35A-B shows a nucleotide sequence (SEQ ID NO:35A-B) of a native sequence PRO70007 cDNA, wherein SEQ ID NO:35A-B is a clone designated herein as “DNA288242”.

[0094] FIG. 36 shows the amino acid sequence (SEQ ID NO:36) derived from the coding sequence of SEQ ID NO:35A-B shown in FIG. 35A-B.

[0095] FIG. 37 shows a nucleotide sequence (SEQ ID NO:37) of a native sequence PRO69463 cDNA, wherein SEQ ID NO:37 is a clone designated herein as “DNA287173”.

[0096] FIG. 38 shows the amino acid sequence (SEQ ID NO:38) derived from the coding sequence of SEQ ID NO:37 shown in FIG. 37.

[0097] FIG. 39 shows a nucleotide sequence (SEQ ID NO:39) of a native sequence PRO62908 cDNA, wherein SEQ ID NO:39 is a clone designated herein as “DNA275214”.

[0098] FIG. 40 shows the amino acid sequence (SEQ ID NO:40) derived from the coding sequence of SEQ ID NO:39 shown in FIG. 39.

[0099] FIG. 41 shows a nucleotide sequence (SEQ ID NO:41) of a native sequence PRO69464 cDNA, wherein SEQ ID NO:41 is a clone designated herein as “DNA287174”.

[0100] FIG. 42 shows the amino acid sequence (SEQ ID NO:42) derived from the coding sequence of SEQ ID NO:41 shown in FIG. 41

[0101] FIG. 43 shows a nucleotide sequence (SEQ ID NO:43) of a native sequence PRO52804 cDNA, wherein SEQ ID NO:43 is a clone designated herein as “DNA287175”.

[0102] FIG. 44 shows the amino acid sequence (SEQ ID NO:44) derived from the coding sequence of SEQ ID NO:43 shown in FIG. 43.

[0103] FIG. 45 shows a nucleotide sequence (SEQ ID NO:45) of a native sequence PRO60438 cDNA, wherein SEQ ID NO:45 is a clone designated herein as “DNA272171”.

[0104] FIG. 46 shows the amino acid sequence (SEQ ID NO:46) derived from the coding sequence of SEQ ID NO:45 shown in FIG. 45.

[0105] FIG. 47 shows a nucleotide sequence (SEQ ID NO:47) of a native sequence PRO69465 cDNA, wherein SEQ ID NO:47 is a clone designated herein as “DNA287176”.

[0106] FIG. 48 shows the amino acid sequence (SEQ ID NO:48) derived from the coding sequence of SEQ ID NO:47 shown in FIG. 47.

[0107] FIG. 49 shows a nucleotide sequence (SEQ ID NO:49) of a native sequence PRO37421 cDNA, wherein SEQ ID NO:49 is a clone designated herein as “DNA226958”.

[0108] FIG. 50 shows the amino acid sequence (SEQ ID NO:50) derived from the coding sequence of SEQ ID NO:49 shown in FIG. 49.

[0109] FIG. 51 shows a nucleotide sequence (SEQ ID NO:5 1) of a native sequence PRO37596 cDNA, wherein SEQ ID NO:51 is a clone designated herein as “DNA227133”.

[0110] FIG. 52 shows the amino acid sequence (SEQ ID NO:52) derived from the coding sequence of SEQ ID NO:51 shown in FIG. 51.

[0111] FIG. 53 shows a nucleotide sequence (SEQ ID NO:53) of a native sequence PRO36124 cDNA, wherein SEQ ID NO:53 is a clone designated herein as “DNA225661”.

[0112] FIG. 54 shows the amino acid sequence (SEQ ID NO:54) derived from the coding sequence of SEQ ID NO:53 shown in FIG. 53.

[0113] FIG. 55 shows a nucleotide sequence (SEQ ID NO:55) of a native sequence PRO69466 cDNA, wherein SEQ ID NO:55 is a clone designated herein as “DNA287177”.

[0114] FIG. 56 shows the amino acid sequence (SEQ ID NO:56) derived from the coding sequence of SEQ ID NO:55 shown in FIG. 55.

[0115] FIG. 57 shows a nucleotide sequence (SEQ ID NO:57) of a native sequence PRO60499 cDNA, wherein SEQ ID NO:57 is a clone designated herein as “DNA272237”.

[0116] FIG. 58 shows the amino acid sequence (SEQ ID NO:58) derived from the coding sequence of SEQ ID NO:57 shown in FIG. 57.

[0117] FIG. 59 shows a nucleotide sequence (SEQ ID NO:59) of a native sequence PRO69467 cDNA, wherein SEQ ID NO:59 is a clone designated herein as “DNA287178”.

[0118] FIG. 60 shows the amino acid sequence (SEQ ID NO:60) derived from the coding sequence of SEQ ID NO:59 shown in FIG. 59.

[0119] FIG. 61 shows a nucleotide sequence (SEQ ID NO:61) of a native sequence PRO61824 cDNA, wherein SEQ ID NO:61 is a clone designated herein as “DNA273865”.

[0120] FIG. 62 shows the amino acid sequence (SEQ ID NO:62) derived from the coding sequence of SEQ ID NO:61 shown in FIG. 61.

[0121] FIG. 63 shows a nucleotide sequence (SEQ ID NO:63) of a native sequence PRO69468 cDNA, wherein SEQ ID NO:63 is a clone designated herein as “DNA287179”.

[0122] FIG. 64 shows the amino acid sequence (SEQ ID NO:64) derived from the coding sequence of SEQ ID NO:63 shown in FIG. 63.

[0123] FIG. 65 shows a nucleotide sequence (SEQ ID NO:65) of a native sequence PRO21341 cDNA, wherein SEQ ID NO:65 is a clone designated herein as “DNA287180”.

[0124] FIG. 66 shows the amino acid sequence (SEQ ID NO:66) derived from the coding sequence of SEQ ID NO:65 shown in FIG. 65.

[0125] FIG. 67A-B shows a nucleotide sequence (SEQ ID NO:67A-B) of a native sequence PRO38213 cDNA, wherein SEQ ID NO:67A-B is a clone designated herein as “DNA227750”.

[0126] FIG. 68 shows the amino acid sequence (SEQ ID NO:68) derived from the coding sequence of SEQ ID NO:67A-B shown in FIG. 67A-B.

[0127] FIG. 69 shows a nucleotide sequence (SEQ ID NO:69) of a native sequence PRO69469 cDNA, wherein SEQ ID NO:69 is a clone designated herein as “DNA287181”.

[0128] FIG. 70 shows the amino acid sequence (SEQ ID NO:70) derived from the coding sequence of SEQ ID NO:69 shown in FIG. 69.

[0129] FIG. 71 shows a nucleotide sequence (SEQ ID NO:71) of a native sequence PRO37172 cDNA, wherein SEQ ID NO:71 is a clone designated herein as “DNA226709”.

[0130] FIG. 72 shows the amino acid sequence (SEQ ID NO:72) derived from the coding sequence of SEQ ID NO:71 shown in FIG. 71.

[0131] FIG. 73 shows a nucleotide sequence (SEQ ID NO:73) of a native sequence PRO35991 cDNA, wherein SEQ ID NO:73 is a clone designated herein as “DNA225528”.

[0132] FIG. 74 shows the amino acid sequence (SEQ ID NO:74) derived from the coding sequence of SEQ ID NO:73 shown in FIG. 73.

[0133] FIG. 75A-B shows a nucleotide sequence (SEQ ID NO:75A-B) of a native sequence PRO36905 cDNA, wherein SEQ ID NO:75A-B is a clone designated herein as “DNA226442”.

[0134] FIG. 76 shows the amino acid sequence (SEQ ID NO:76) derived from the coding sequence of SEQ ID NO:75A-B shown in FIG. 75A-B.

[0135] FIG. 77 shows a nucleotide sequence (SEQ ID NO:77) of a native sequence PRO69470 cDNA, wherein SEQ ID NO:77 is a clone designated herein as “DNA287182”.

[0136] FIG. 78 shows the amino acid sequence (SEQ ID NO:78) derived from the coding sequence of SEQ ID NO:77 shown in FIG. 77.

[0137] FIG. 79 shows a nucleotide sequence (SEQ ID NO:79) of a native sequence PRO36451 cDNA, wherein SEQ ID NO:79 is a clone designated herein as “DNA288243”.

[0138] FIG. 80 shows the amino acid sequence (SEQ ID NO:80) derived from the coding sequence of SEQ ID NO:79 shown in FIG. 79.

[0139] FIG. 81 shows a nucleotide sequence (SEQ ID NO:81) of a native sequence PRO69471 cDNA, wherein SEQ ID NO:81 is a clone designated herein as “DNA287184”.

[0140] FIG. 82 shows the amino acid sequence (SEQ ID NO:82) derived from the coding sequence of SEQ ID NO:81 shown in FIG. 81.

[0141] FIG. 83 shows a nucleotide sequence (SEQ ID NO:83) of a native sequence PRO37492 cDNA, wherein SEQ ID NO:83 is a clone designated herein as “DNA227029”.

[0142] FIG. 84 shows the amino acid sequence (SEQ ID NO:84) derived from the coding sequence of SEQ ID NO:83 shown in FIG. 83.

[0143] FIG. 85A-B shows a nucleotide sequence (SEQ ID NO:85A-B) of a native sequence PRO70008 cDNA, wherein SEQ ID NO:85A-B is a clone designated herein as “DNA288244”.

[0144] FIG. 86 shows the amino acid sequence (SEQ ID NO:86) derived from the coding sequence of SEQ ID NO:85A-B shown in FIG. 85A-B.

[0145] FIG. 87 shows a nucleotide sequence (SEQ ID NO:87) of a native sequence PRO69472 cDNA, wherein SEQ ID NO:87 is a clone designated herein as “DNA287186”.

[0146] FIG. 88 shows the amino acid sequence (SEQ ID NO:88) derived from the coding sequence of SEQ ID NO:87 shown in FIG. 87.

[0147] FIG. 89 shows a nucleotide sequence (SEQ ID NO:89) of a native sequence PRO69473 cDNA, wherein SEQ ID NO:89 is a clone designated herein as “DNA287187”.

[0148] FIG. 90 shows the amino acid sequence (SEQ ID NO:90) derived from the coding sequence of SEQ ID NO:89 shown in FIG. 89.

[0149] FIG. 91 shows a nucleotide sequence (SEQ ID NO:91) of a native sequence PRO36996 cDNA, wherein SEQ ID NO:91 is a clone designated herein as “DNA226533”.

[0150] FIG. 92 shows the amino acid sequence (SEQ ID NO:92) derived from the coding sequence of SEQ ID NO:91 shown in FIG. 91.

[0151] FIG. 93 shows a nucleotide sequence (SEQ ID NO:93) of a native sequence PRO22613 cDNA, wherein SEQ ID NO:93 is a clone designated herein as “DNA189698”.

[0152] FIG. 94 shows the amino acid sequence (SEQ ID NO:94) derived from the coding sequence of SEQ ID NO:93 shown in FIG. 93.

[0153] FIG. 95 shows a nucleotide sequence (SEQ ID NO:95) of a native sequence PRO69475 cDNA, wherein SEQ ID NO:95 is a clone designated herein as “DNA287189”.

[0154] FIG. 96 shows the amino acid sequence (SEQ ID NO:96) derived from the coding sequence of SEQ ID NO:95 shown in FIG. 95.

[0155] FIG. 97 shows a nucleotide sequence (SEQ ID NO:97) of a native sequence PRO61755 cDNA, wherein SEQ ID NO:97 is a clone designated herein as “DNA273794”.

[0156] FIG. 98 shows the amino acid sequence (SEQ ID NO:98) derived from the coding sequence of SEQ ID NO:97 shown in FIG. 97.

[0157] FIG. 99 shows a nucleotide sequence (SEQ ID NO:99) of a native sequence PRO70009 cDNA, wherein SEQ ID NO:99 is a clone designated herein as “DNA288245”.

[0158] FIG. 100 shows the amino acid sequence (SEQ ID NO:100) derived from the coding sequence of SEQ ID NO:99 shown in FIG. 99.

[0159] FIG. 101 shows a nucleotide sequence (SEQ ID NO:101) of a native sequence PRO69476 cDNA, wherein SEQ ID NO:101 is a clone designated herein as “DNA287190”.

[0160] FIG. 102 shows the amino acid sequence (SEQ ID NO:102) derived from the coding sequence of SEQ ID NO:101 shown in FIG. 101.

[0161] FIG. 103 shows a nucleotide sequence (SEQ ID NO:103) of a native sequence PRO4881 cDNA, wherein SEQ ID NO:103 is a clone designated herein as “DNA103554”.

[0162] FIG. 104 shows the amino acid sequence (SEQ ID NO:104) derived from the coding sequence of SEQ ID NO:103 shown in FIG. 103.

[0163] FIG. 105A-B shows a nucleotide sequence (SEQ ID NO:105A-B) of a native sequence PRO12876 cDNA, wherein SEQ ID NO:105A-B is a clone designated herein as “DNA151420”.

[0164] FIG. 106 shows the amino acid sequence (SEQ ID NO:106) derived from the coding sequence of SEQ ID NO:105A-B shown in FIG. 105A-B.

[0165] FIG. 107 shows a nucleotide sequence (SEQ ID NO:107) of a native sequence PRO70010 cDNA, wherein SEQ ID NO:107 is a clone designated herein as “DNA288246”.

[0166] FIG. 108 shows the amino acid sequence (SEQ ID NO:108) derived from the coding sequence of SEQ ID NO:107 shown in FIG. 107.

[0167] FIG. 109 shows a nucleotide sequence (SEQ ID NO:109) of a native sequence PRO37534 cDNA, wherein SEQ ID NO:109 is a clone designated herein as “DNA227071 ”.

[0168] FIG. 110 shows the amino acid sequence (SEQ ID NO:110) derived from the coding sequence of SEQ ID NO:109 shown in FIG. 109.

[0169] FIG. 111A-B shows a nucleotide sequence (SEQ ID NO:111A-B) of a native sequence PRO21928 cDNA, wherein SEQ ID NO:111A-B is a clone designated herein as “DNA188400”.

[0170] FIG. 112 shows the amino acid sequence (SEQ ID NO:112) derived from the coding sequence of SEQ ID NO:111A-B shown in FIG. 111A-B.

[0171] FIG. 113A-B shows a nucleotide sequence (SEQ ID NO:113A-B) of a native sequence PRO69478 cDNA, wherein SEQ ID NO:113A-B is a clone designated herein as “DNA287192”.

[0172] FIG. 114 shows the amino acid sequence (SEQ ID NO:114) derived from the coding sequence of SEQ ID NO:113A-B shown in FIG. 113 A-B.

[0173] FIG. 115A-B shows a nucleotide sequence (SEQ ID NO:115A-B) of a native sequence PRO69479 cDNA, wherein SEQ ID NO:115A-B is a clone designated herein as “DNA287193”.

[0174] FIG. 116 shows the amino acid sequence (SEQ ID NO:116) derived from the coding sequence of SEQ ID NO:115A-B shown in FIG. 115 A-B.

[0175] FIG. 117 shows a nucleotide sequence (SEQ ID NO:117) of a native sequence PRO69480 cDNA, wherein SEQ ID NO:117 is a clone designated herein as “DNA287194”.

[0176] FIG. 118 shows the amino acid sequence (SEQ ID NO:118) derived from the coding sequence of SEQ ID NO:117 shown in FIG. 117.

[0177] FIG. 119 shows a nucleotide sequence (SEQ ID NO:119) of a native sequence PRO69481 cDNA, wherein SEQ ID NO:119 is a clone designated herein as “DNA287195”.

[0178] FIG. 120 shows the amino acid sequence (SEQ ID NO:120) derived from the coding sequence of SEQ ID NO:119 shown in FIG. 119.

[0179] FIG. 121 shows a nucleotide sequence (SEQ ID NO:121) of a native sequence PRO69482 cDNA, wherein SEQ ID NO:121 is a clone designated herein as “DNA287196”.

[0180] FIG. 122 shows the amino acid sequence (SEQ ID NO:122) derived from the coding sequence of SEQ ID NO:121 shown in FIG. 121.

[0181] FIG. 123 shows a nucleotide sequence (SEQ ID NO:123) of a native sequence PRO69483 cDNA, wherein SEQ ID NO:123 is a clone designated herein as “DNA287197”.

[0182] FIG. 124 shows the amino acid sequence (SEQ ID NO:124) derived from the coding sequence of SEQ ID NO:123 shown in FIG. 123.

[0183] FIG. 125 shows a nucleotide sequence (SEQ ID NO:125) of a native sequence PRO38642 cDNA, wherein SEQ ID NO:125 is a clone designated herein as “DNA228179”.

[0184] FIG. 126 shows the amino acid sequence (SEQ ID NO:126) derived from the coding sequence of SEQ ID NO:125 shown in FIG. 125.

[0185] FIG. 127 shows a nucleotide sequence (SEQ ID NO:127) of a native sequence PRO69484 cDNA, wherein SEQ ID NO:127 is a clone designated herein as “DNA287198”.

[0186] FIG. 128 shows the amino acid sequence (SEQ ID NO:128) derived from the coding sequence of SEQ ID NO:127 shown in FIG. 127.

[0187] FIG. 129 shows a nucleotide sequence (SEQ ID NO:129) of a native sequence PRO66269 cDNA, wherein SEQ ID NO:129 is a clone designated herein as “DNA287199”.

[0188] FIG. 130 shows the amino acid sequence (SEQ ID NO:130) derived from the coding sequence of SEQ ID NO:129 shown in FIG. 129.

[0189] FIG. 131 shows a nucleotide sequence (SEQ ID NO:131) of a native sequence PRO1723 cDNA, wherein SEQ ID NO:131 is a clone designated herein as “DNA82376”.

[0190] FIG. 132 shows the amino acid sequence (SEQ ID NO:132) derived from the coding sequence of SEQ ID NO:131 shown in FIG. 131.

[0191] FIG. 133 shows a nucleotide sequence (SEQ ID NO:133) of a native sequence PRO22297 cDNA, wherein SEQ ID NO:133 is a clone designated herein as “DNA287623”.

[0192] FIG. 134 shows the amino acid sequence (SEQ ID NO:134) derived from the coding sequence of SEQ ID NO:133 shown in FIG. 133.

[0193] FIG. 135 shows a nucleotide sequence (SEQ ID NO:135) of a native sequence PRO61349 cDNA, wherein SEQ ID NO:135 is a clone designated herein as “DNA273346”.

[0194] FIG. 136 shows the amino acid sequence (SEQ ID NO:136) derived from the coding sequence of SEQ ID NO:]135 shown in FIG. 135.

[0195] FIG. 137 shows a nucleotide sequence (SEQ ID NO:137) of a native sequence PRO69485 cDNA, wherein SEQ ID NO:137 is a clone designated herein as “DNA287201 ”.

[0196] FIG. 138 shows the amino acid sequence (SEQ ID NO:138) derived from the coding sequence of SEQ ID NO:137 shown in FIG. 137.

[0197] FIG. 139 shows a nucleotide sequence (SEQ ID NO:139) of a native sequence PRO69486 cDNA, wherein SEQ ID NO:139 is a clone designated herein as “DNA287202”.

[0198] FIG. 140 shows the amino acid sequence (SEQ ID NO:140) derived from the coding sequence of SEQ ID NO:139 shown in FIG. 139.

[0199] FIG. 141 shows a nucleotide sequence (SEQ ID NO:141) of a native sequence PRO69487 cDNA, wherein SEQ ID NO:141 is a clone designated herein as “DNA287203”.

[0200] FIG. 142 shows the amino acid sequence (SEQ ID NO:142) derived from the coding sequence of SEQ ID NO:141 shown in FIG. 141.

[0201] FIG. 143 shows a nucleotide sequence (SEQ ID NO:143) of a native sequence PRO36963 cDNA, wherein SEQ ID NO:143 is a clone designated herein as “DNA226500”.

[0202] FIG. 144 shows the amino acid sequence (SEQ ID NO:144) derived from the coding sequence of SEQ ID NO:143 shown in FIG. 143.

[0203] FIG. 145 shows a nucleotide sequence (SEQ ID NO:145) of a native sequence PRO23814 cDNA, wherein SEQ ID NO:145 is a clone designated herein as “DNA287204”.

[0204] FIG. 146 shows the amino acid sequence (SEQ ID NO:146) derived from the coding sequence of SEQ ID NO:145 shown in FIG. 145.

[0205] FIG. 147 shows a nucleotide sequence (SEQ ID NO:147) of a native sequence PRO57980 cDNA, wherein SEQ ID NO:147 is a clone designated herein as “DNA287205 ”.

[0206] FIG. 148 shows the amino acid sequence (SEQ ID NO:148) derived from the coding sequence of SEQ ID NO:147 shown in FIG. 147.

[0207] FIG. 149 shows a nucleotide sequence (SEQ ID NO:149) of a native sequence PRO20128 cDNA, wherein SEQ ID NO:149 is a clone designated herein as “DNA171400”.

[0208] FIG. 150 shows the amino acid sequence (SEQ ID NO:150) derived from the coding sequence of SEQ ID NO:149 shown in FIG. 149.

[0209] FIG. 151 shows a nucleotide sequence (SEQ ID NO:151) of a native sequence PRO4551 cDNA, wherein SEQ ID NO:15I is a clone designated herein as “DNA103221”.

[0210] FIG. 152 shows the amino acid sequence (SEQ ID NO:152) derived from the coding sequence of SEQ ID NO:151 shown in FIG. 151.

[0211] FIG. 153 shows a nucleotide sequence (SEQ ID NO:153) of a native sequence PRO69488 cDNA, wherein SEQ ID NO:153 is a clone designated herein as “DNA287206”.

[0212] FIG. 154 shows the amino acid sequence (SEQ ID NO:154) derived from the coding sequence of SEQ ID NO:153 shown in FIG. 153.

[0213] FIG. 155 shows a nucleotide sequence (SEQ ID NO:155) of a native sequence PRO39268 cDNA, wherein SEQ ID NO:155 is a clone designated herein as “DNA287207”.

[0214] FIG. 156 shows the amino acid sequence (SEQ ID NO:156) derived from the coding sequence of SEQ ID NO:155 shown in FIG. 155.

[0215] FIG. 157 shows a nucleotide sequence (SEQ ID NO:157) of a native sequence PRO69489 cDNA, wherein SEQ ID NO:157 is a clone designated herein as “DNA287208”.

[0216] FIG. 158 shows the amino acid sequence (SEQ ID NO:158) derived from the coding sequence of SEQ ID NO:157 shown in FIG. 157.

[0217] FIG. 159 shows a nucleotide sequence (SEQ ID NO:159) of a native sequence PRO69490 cDNA, wherein SEQ ID NO:159 is a clone designated herein as “DNA287209”.

[0218] FIG. 160 shows the amino acid sequence (SEQ ID NO:160) derived from the coding sequence of SEQ ID NO:159 shown in FIG. 159.

[0219] FIG. 161 shows a nucleotide sequence (SEQ ID NO:161) of a native sequence PRO69491 cDNA, wherein SEQ ID NO:161 is a clone designated herein as “DNA287625”.

[0220] FIG. 162 shows the amino acid sequence (SEQ ID NO:162) derived from the coding sequence of SEQ ID NO:161 shown in FIG. 161.

[0221] FIG. 163 shows a nucleotide sequence (SEQ ID NO:163) of a native sequence PRO69492 cDNA, wherein SEQ ID NO:163 is a clone designated herein as “DNA287211 ”.

[0222] FIG. 164 shows the amino acid sequence (SEQ ID NO:164) derived from the coding sequence of SEQ ID NO:163 shown in FIG. 163.

[0223] FIG. 165 shows a nucleotide sequence (SEQ ID NO:165) of a native sequence PRO37713 cDNA, wherein SEQ ID NO:165 is a clone designated herein as “DNA227250”.

[0224] FIG. 166 shows the amino acid sequence (SEQ ID NO:166) derived from the coding sequence of SEQ ID NO:165 shown in FIG. 165.

[0225] FIG. 167 shows a nucleotide sequence (SEQ ID NO:167) of a native sequence PRO58993cDNA, wherein SEQ ID NO:167 is a clone designated herein as “DNA287212”.

[0226] FIG. 168 shows the amino acid sequence (SEQ ID NO:168) derived from the coding sequence of SEQ ID NO:167 shown in FIG. 167.

[0227] FIG. 169 shows a nucleotide sequence (SEQ ID NO:169) of a native sequence PRO69493 cDNA, wherein SEQ ID NO:169 is a clone designated herein as “DNA287213”.

[0228] FIG. 170 shows the amino acid sequence (SEQ ID NO:170) derived from the coding sequence of SEQ ID NO:169 shown in FIG. 169.

[0229] FIG. 171 shows a nucleotide sequence (SEQ ID NO:171) of a native sequence PRO69494 cDNA, wherein SEQ ID NO:171 is a clone designated herein as “DNA287214”.

[0230] FIG. 172 shows the amino acid sequence (SEQ ID NO:172) derived from the coding sequence of SEQ ID NO:171 shown in FIG. 171.

[0231] FIG. 173 shows a nucleotide sequence (SEQ ID NO:173) of a native sequence PRO69495 cDNA, wherein SEQ ID NO:173 is a clone designated herein as “DNA287215”.

[0232] FIG. 174 shows the amino acid sequence (SEQ ID NO:174) derived from the coding sequence of SEQ ID NO:173 shown in FIG. 173.

[0233] FIG. 175 shows a nucleotide sequence (SEQ ID NO:175) of a native sequence PRO70011 cDNA, wherein SEQ ID NO:175 is a clone designated herein as “DNA288247”.

[0234] FIG. 176 shows the amino acid sequence (SEQ ID NO:176) derived from the coding sequence of SEQ ID NO:175 shown in FIG. 175.

[0235] FIG. 177 shows a nucleotide sequence (SEQ ID NO:177) of a native sequence PRO62861 cDNA, wherein SEQ ID NO:177 is a clone designated herein as “DNA275157”.

[0236] FIG. 178 shows the amino acid sequence (SEQ ID NO:178) derived from the coding sequence of SEQ ID NO:177 shown in FIG. 177.

[0237] FIG. 179 shows a nucleotide sequence (SEQ ID NO:179) of a native sequence PRO36640 cDNA, wherein SEQ ID NO:179 is a clone designated herein as “DNA226177”.

[0238] FIG. 180 shows the amino acid sequence (SEQ ID NO:180) derived from the coding sequence of SEQ ID NO:179 shown in FIG. 179.

[0239] FIG. 181 A-B shows a nucleotide sequence (SEQ ID NO:181A-B) of a native sequence PRO36766 cDNA, wherein SEQ ID NO:181A-B is a clone designated herein as “DNA287217”.

[0240] FIG. 182 shows the amino acid sequence (SEQ ID NO:182) derived from the coding sequence of SEQ ID NO:181A-B shown in FIG. 181A-B.

[0241] FIG. 183 shows a nucleotide sequence (SEQ ID NO:183) of a native sequence PRO69497 cDNA, wherein SEQ ID NO:183 is a clone designated herein as “DNA287218”.

[0242] FIG. 184 shows the amino acid sequence (SEQ ID NO:184) derived from the coding sequence of SEQ ID NO:183 shown in FIG. 183.

[0243] FIG. 185 shows a nucleotide sequence (SEQ ID NO:185) of a native sequence PRO69498 cDNA, wherein SEQ ID NO:185 is a clone designated herein as “DNA287219”.

[0244] FIG. 186 shows the amino acid sequence (SEQ ID NO:186) derived from the coding sequence of SEQ ID NO:185 shown in FIG. 185.

[0245] FIG. 187 shows a nucleotide sequence (SEQ ID NO:187) of a native sequence PRO69499 cDNA, wherein SEQ ID NO:187 is a clone designated herein as “DNA287220”.

[0246] FIG. 188 shows the amino acid sequence (SEQ ID NO:188) derived from the coding sequence of SEQ ID NO:187 shown in FIG. 187.

[0247] FIG. 189 shows a nucleotide sequence (SEQ ID NO:189) of a native sequence PRO69500 cDNA, wherein SEQ ID NO:189 is a clone designated herein as “DNA287221 ”.

[0248] FIG. 190 shows the amino acid sequence (SEQ ID NO:l90) derived from the coding sequence of SEQ ID NO:189 shown in FIG. 189.

[0249] FIG. 191 shows a nucleotide sequence (SEQ ID NO:191) of a native sequence PRO69501 cDNA, wherein SEQ ID NO:191 is a clone designated herein as “DNA287222”.

[0250] FIG. 192 shows the amino acid sequence (SEQ ID NO:192) derived from the coding sequence of SEQ ID NO:191 shown in FIG. 191.

[0251] FIG. 193 shows a nucleotide sequence (SEQ ID NO:193) of a native sequence PRO70012 cDNA, wherein SEQ ID NO:193 is a clone designated herein as “DNA288248”.

[0252] FIG. 194 shows the amino acid sequence (SEQ ID NO:194) derived from the coding sequence of SEQ ID NO:193 shown in FIG. 193.

[0253] FIG. 195 shows a nucleotide sequence (SEQ ID NO:195) of a native sequence PRO69503 cDNA, wherein SEQ ID NO:195 is a clone designated herein as “DNA287224”.

[0254] FIG. 196 shows the amino acid sequence (SEQ ID NO:196) derived from the coding sequence of SEQ ID NO:195 shown in FIG. 195.

[0255] FIG. 197 shows a nucleotide sequence (SEQ ID NO:197) of a native sequence PRO69474 cDNA, wherein SEQ ID NO:197 is a clone designated herein as “DNA287188”.

[0256] FIG. 198 shows the amino acid sequence (SEQ ID NO:198) derived from the coding sequence of SEQ ID NO:197 shown in FIG. 197.

[0257] FIG. 199 shows a nucleotide sequence (SEQ ID NO:199) of a native sequence PRO69505 cDNA, wherein SEQ ID NO:199 is a clone designated herein as “DNA287226”.

[0258] FIG. 200 shows the amino acid sequence (SEQ ID NO:200) derived from the coding sequence of SEQ ID NO:199 shown in FIG. 199.

[0259] FIG. 201 shows a nucleotide sequence (SEQ ID NO:201) of a native sequence PRO69506 cDNA, wherein SEQ ID NO:201 is a clone designated herein as “DNA287227”.

[0260] FIG. 202 shows the amino acid sequence (SEQ ID NO:202) derived from the coding sequence of SEQ ID NO:201 shown in FIG. 201.

[0261] FIG. 203 shows a nucleotide sequence (SEQ ID NO:203) of a native sequence PRO69507 cDNA, wherein SEQ ID NO:203 is a clone designated herein as “DNA288249”.

[0262] FIG. 204 shows the amino acid sequence (SEQ ID NO:204) derived from the coding sequence of SEQ ID NO:203 shown in FIG. 203.

[0263] FIG. 205 shows a nucleotide sequence (SEQ ID NO:205) of a native sequence PRO51301 cDNA, wherein SEQ ID NO:205 is a clone designated herein as “DNA256257”.

[0264] FIG. 206 shows the amino acid sequence (SEQ ID NO:206) derived from the coding sequence of SEQ ID NO:205 shown in FIG. 205.

[0265] FIG. 207 shows a nucleotide sequence (SEQ ID NO:207) of a native sequence PRO69508 cDNA, wherein SEQ ID NO:207 is a clone designated herein as “DNA287229”.

[0266] FIG. 208 shows the amino acid sequence (SEQ ID NO:208) derived from the coding sequence of SEQ ID NO:207 shown in FIG. 207.

[0267] FIG. 209 shows a nucleotide sequence (SEQ ID NO:209) of a native sequence PRO69509 cDNA, wherein SEQ ID NO:209 is a clone designated herein as “DNA287230”.

[0268] FIG. 210 shows the amino acid sequence (SEQ ID NO:210) derived from the coding sequence of SEQ ID NO:209 shown in FIG. 209.

[0269] FIG. 211 shows a nucleotide sequence (SEQ ID NO:2 11) of a native sequence PRO69510 cDNA, wherein SEQ ID NO:211 is a clone designated herein as “DNA287231”.

[0270] FIG. 212 shows the amino acid sequence (SEQ ID NO:212) derived from the coding sequence of SEQ ID NO:211 shown in FIG. 211.

[0271] FIG. 213 shows a nucleotide sequence (SEQ ID NO:213) of a native sequence PRO69511 cDNA, wherein SEQ ID NO:213 is a clone designated herein as “DNA287232”.

[0272] FIG. 214 shows the amino acid sequence (SEQ ID NO:214) derived from the coding sequence of SEQ ID NO:213 shown in FIG. 213.

[0273] FIG. 215 shows a nucleotide sequence (SEQ ID NO:215) of a native sequence PRO51309 cDNA, wherein SEQ ID NO:215 is a clone designated herein as “DNA256265”.

[0274] FIG. 216 shows the amino acid sequence (SEQ ID NO:216) derived from the coding sequence of SEQ ID NO:215 shown in FIG. 215.

[0275] FIG. 217A-B shows a nucleotide sequence (SEQ ID NO:217A-B) of a native sequence PRO50578 cDNA, wherein SEQ ID NO:217A-B is a clone designated herein as “DNA255513”.

[0276] FIG. 218 shows the amino acid sequence (SEQ ID NO:218) derived from the coding sequence of SEQ ID NO:217A-B shown in FIG. 217A-B.

[0277] FIG. 219A-B shows a nucleotide sequence (SEQ ID NO:219A-B) of a native sequence PRO69512 cDNA, wherein SEQ ID NO:219A-B is a clone designated herein as “DNA287233”.

[0278] FIG. 220 shows the amino acid sequence (SEQ ID NO:220) derived from the coding sequence of SEQ ID NO:219A-B shown in FIG. 219A-B.

[0279] FIG. 221 shows a nucleotide sequence (SEQ ID NO:221) of a native sequence PRO69513 cDNA, wherein SEQ ID NO:221 is a clone designated herein as “DNA287234”.

[0280] FIG. 222 shows the amino acid sequence (SEQ ID NO:222) derived from the coding sequence of SEQ ID NO:221 shown in FIG. 221.

[0281] FIG. 223 shows a nucleotide sequence (SEQ ID NO:223) of a native sequence PRO69514 cDNA, wherein SEQ ID NO:223 is a clone designated herein as “DNA287235”.

[0282] FIG. 224 shows the amino acid sequence (SEQ ID NO:224) derived from the coding sequence of SEQ ID NO:223 shown in FIG. 223.

[0283] FIG. 225A-B shows a nucleotide sequence (SEQ ID NO:225A-B) of a native sequence PRO10607 cDNA, wherein SEQ ID NO:225A-B is a clone designated herein as “DNA287236”.

[0284] FIG. 226 shows the amino acid sequence (SEQ ID NO:226) derived from the coding sequence of SEQ ID NO:225A-B shown in FIG. 225A-B.

[0285] FIG. 227A-B shows a nucleotide sequence (SEQ ID NO:227A-B) of a native sequence PRO61705 cDNA, wherein SEQ ID NO:227A-B is a clone designated herein as “DNA273742”.

[0286] FIG. 228 shows the amino acid sequence (SEQ ID NO:228) derived from the coding sequence of SEQ ID NO:227A-B shown in FIG. 227A-B.

[0287] FIG. 229 shows a nucleotide sequence (SEQ ID NO:229) of a native sequence PRO49214 cDNA, wherein SEQ ID NO:229 is a clone designated herein as “DNA253811”.

[0288] FIG. 230 shows the amino acid sequence (SEQ ID NO:230) derived from the coding sequence of SEQ ID NO:229 shown in FIG. 229.

[0289] FIG. 231 shows a nucleotide sequence (SEQ ID NO:23 1) of a native sequence PRO39648 cDNA, wherein SEQ ID NO:231 is a clone designated herein as “DNA287237”.

[0290] FIG. 232 shows the amino acid sequence (SEQ ID NO:232) derived from the coding sequence of SEQ ID NO:231 shown in FIG. 231.

[0291] FIG. 233 shows a nucleotide sequence (SEQ ID NO:233) of a native sequence PRO69515 cDNA, wherein SEQ ID NO:233 is a clone designated herein as “DNA287238”.

[0292] FIG. 234 shows the amino acid sequence (SEQ ID NO:234) derived from the coding sequence of SEQ ID NO:233 shown in FIG. 233.

[0293] FIG. 235 shows a nucleotide sequence (SEQ ID NO:235) of a native sequence PRO38497 cDNA, wherein SEQ ID NO:235 is a clone designated herein as “DNA287239”.

[0294] FIG. 236 shows the amino acid sequence (SEQ ID NO:236) derived from the coding sequence of SEQ ID NO:235 shown in FIG. 235.

[0295] FIG. 237 shows a nucleotide sequence (SEQ ID NO:237) of a native sequence PRO29371 cDNA, wherein SEQ ID NO:237 is a clone designated herein as “DNA287240”.

[0296] FIG. 238 shows the amino acid sequence (SEQ ID NO:238) derived from the coding sequence of SEQ ID NO:237 shown in FIG. 237.

[0297] FIG. 239 shows a nucleotide sequence (SEQ ID NO:239) of a native sequence PRO70013 cDNA, wherein SEQ ID NO:239 is a clone designated herein as “DNA288250”.

[0298] FIG. 240 shows the amino acid sequence (SEQ ID NO:240) derived from the coding sequence of SEQ ID NO:239 shown in FIG. 239.

[0299] FIG. 241 shows a nucleotide sequence (SEQ ID NO:241) of a native sequence PRO69516 cDNA, wherein SEQ ID NO:241 is a clone designated herein as “DNA28724 1”.

[0300] FIG. 242 shows the amino acid sequence (SEQ ID NO:242) derived from the coding sequence of SEQ ID NO:241 shown in FIG. 241.

[0301] FIG. 243 shows a nucleotide sequence (SEQ ID NO:243) of a native sequence PRO69517 cDNA, wherein SEQ ID NO:243 is a clone designated herein as “DNA287242”.

[0302] FIG. 244 shows the amino acid sequence (SEQ ID NO:244) derived from the coding sequence of SEQ ID NO:243 shown in FIG. 243.

[0303] FIG. 245 shows a nucleotide sequence (SEQ ID NO:245) of a native sequence PRO69518 cDNA, wherein SEQ ID NO:245 is a clone designated herein as “DNA287243”.

[0304] FIG. 246 shows the amino acid sequence (SEQ ID NO:246) derived from the coding sequence of SEQ ID NO:245 shown in FIG. 245.

[0305] FIG. 247 shows a nucleotide sequence (SEQ ID NO:247) of a native sequence PRO70014 cDNA, wherein SEQ ID NO:247 is a clone designated herein as “DNA2882541”.

[0306] FIG. 248 shows the amino acid sequence (SEQ ID NO:248) derived from the coding sequence of SEQ ID NO:247 shown in FIG. 247.

[0307] FIG. 249 shows a nucleotide sequence (SEQ ID NO:249) of a native sequence PRO69520 cDNA, wherein SEQ ID NO:249 is a clone designated herein as “DNA287245”.

[0308] FIG. 250 shows the amino acid sequence (SEQ ID NO:250) derived from the coding sequence of SEQ ID NO:249 shown in FIG. 249.

[0309] FIG. 251 shows a nucleotide sequence (SEQ ID NO:251) of a native sequence PRO69521 cDNA, wherein SEQ ID NO:251 is a clone designated herein as “DNA287246”.

[0310] FIG. 252 shows the amino acid sequence (SEQ ID NO:252) derived from the coding sequence of SEQ ID NO:251 shown in FIG. 251.

[0311] FIG. 253 shows a nucleotide sequence (SEQ ID NO:253) of a native sequence PRO69522 cDNA, wherein SEQ ID NO:253 is a clone designated herein as “DNA287247”.

[0312] FIG. 254 shows the amino acid sequence (SEQ ID NO:254) derived from the coding sequence of SEQ ID NO:253 shown in FIG. 253.

[0313] FIG. 255 shows a nucleotide sequence (SEQ ID NO:255) of a native sequence PRO69523 cDNA, wherein SEQ ID NO:255 is a clone designated herein as “DNA287628”.

[0314] FIG. 256 shows the amino acid sequence (SEQ ID NO:256) derived from the coding sequence of SEQ ID NO:255 shown in FIG. 255.

[0315] FIG. 257 shows a nucleotide sequence (SEQ ID NO:257) of a native sequence PRO60513 cDNA, wherein SEQ ID NO:257 is a clone designated herein as “DNA272251”.

[0316] FIG. 258 shows the amino acid sequence (SEQ ID NO:258) derived from the coding sequence of SEQ ID NO:257 shown in FIG. 257.

[0317] FIG. 259 shows a nucteotide sequence (SEQ ID NO:259) of a native sequence PRO2512 cDNA, wherein SEQ ID NO:259 is a clone designated herein as “DNA288252”.

[0318] FIG. 260 shows the amino acid sequence (SEQ ID NO:260) derived from the coding sequence of SEQ ID NO:259 shown in FIG. 259.

[0319] FIG. 261 shows a nucleotide sequence (SEQ ID NO:261) of a native sequence PRO69524 cDNA, wherein SEQ ID NO:261 is a clone designated herein as “DNA287250”.

[0320] FIG. 262 shows the amino acid sequence (SEQ ID NO:262) derived from the coding sequence of SEQ ID NO:261 shown in FIG. 261.

[0321] FIG. 263 shows a nucleotide sequence (SEQ ID NO:263) of a native sequence PRO12569 cDNA, wherein SEQ ID NO:263 is a clone designated herein as “DNA 150989”.

[0322] FIG. 264 shows the amino acid sequence (SEQ ID NO:264) derived from the coding sequence of SEQ ID NO:263 shown in FIG. 263.

[0323] FIG. 265 shows a nucleotide sequence (SEQ ID NO:265) of a native sequence PRO69525 cDNA, wherein SEQ ID NO:265 is a clone designated herein as “DNA28725 1”.

[0324] FIG. 266 shows the amino acid sequence (SEQ ID NO:266) derived from the coding sequence of SEQ ID NO:265 shown in FIG. 265.

[0325] FIG. 267 shows a nucleotide sequence (SEQ ID NO:267) of a native sequence PRO69526 cDNA, wherein SEQ ID NO:267 is a clone designated herein as “DNA287252”.

[0326] FIG. 268 shows the amino acid sequence (SEQ ID NO:268) derived from the coding sequence of SEQ ID NO:267 shown in FIG. 267.

[0327] FIG. 269 shows a nucleotide sequence (SEQ ID NO:269) of a native sequence PRO69527 cDNA, wherein SEQ ID NO:269 is a clone designated herein as “DNA287253”.

[0328] FIG. 270 shows the amino acid sequence (SEQ ID NO:270) derived from the coding sequence of SEQ ID NO:269 shown in FIG. 269.

[0329] FIG. 271 shows a nucleotide sequence (SEQ ID NO:27 1) of a native sequence PRO69528 cDNA, wherein SEQ ID NO:271 is a clone designated herein as “DNA287254”.

[0330] FIG. 272 shows the amino acid sequence (SEQ ID NO:272) derived from the coding sequence of SEQ ID NO:271 shown in FIG. 271.

[0331] FIG. 273 shows a nucleotide sequence (SEQ ID NO:273) of a native sequence PRO69529 cDNA, wherein SEQ ID NO:273 is a clone designated herein as “DNA287255”.

[0332] FIG. 274 shows the amino acid sequence (SEQ ID NO:274) derived from the coding sequence of SEQ ID NO:273 shown in FIG. 273.

[0333] FIG. 275 shows a nucleotide sequence (SEQ ID NO:275) of a native sequence PRO12166 cDNA, wherein SEQ ID NO:275 is a clone designated herein as “DNA151021”.

[0334] FIG. 276 shows the amino acid sequence (SEQ ID NO:276) derived from the coding sequence of SEQ ID NO:275 shown in FIG. 275.

[0335] FIG. 277 shows a nucleotide sequence (SEQ ID NO:277) of a native sequence PRO2154 cDNA, wherein SEQ ID NO:277 is a clone designated herein as “DNA287630”.

[0336] FIG. 278 shows the amino acid sequence (SEQ ID NO:278) derived from the coding sequence of SEQ ID NO:277 shown in FIG. 277.

[0337] FIG. 279 shows a nucleotide sequence (SEQ ID NO:279) of a native sequence PRO69530 cDNA, wherein SEQ ID NO:279 is a clone designated herein as “DNA287257”.

[0338] FIG. 280 shows the amino acid sequence (SEQ ID NO:280) derived from the coding sequence of SEQ ID NO:279 shown in FIG. 279.

[0339] FIG. 281 shows a nucleotide sequence (SEQ ID NO:281) of a native sequence PRO51916 cDNA, wherein SEQ ID NO:281 is a clone designated herein as “DNA257326”.

[0340] FIG. 282 shows the amino acid sequence (SEQ ID NO:282) derived from the coding sequence of SEQ ID NO:281 shown in FIG. 281.

[0341] FIG. 283 shows a nucleotide sequence (SEQ ID NO:283) of a native sequence PRO52174 cDNA, wherein SEQ ID NO:283 is a clone designated herein as “DNA287258”.

[0342] FIG. 284 shows the amino acid sequence (SEQ ID NO:284) derived from the coding sequence of SEQ ID NO:283 shown in FIG. 283.

[0343] FIG. 285 shows a nucleotide sequence (SEQ ID NO:285) of a native sequence PRO69531 cDNA, wherein SEQ ID NO:285 is a clone designated herein as “DNA287259”.

[0344] FIG. 286 shows the amino acid sequence (SEQ ID NO:286) derived from the coding sequence of SEQ ID NO:285 shown in FIG. 285.

[0345] FIG. 287 shows a nucleotide sequence (SEQ ID NO:287) of a native sequence PRO69532 cDNA, wherein SEQ ID NO:287 is a clone designated herein as “DNA287260”.

[0346] FIG. 288 shows the amino acid sequence (SEQ ID NO:288) derived from the coding sequence of SEQ ID NO:287 shown in FIG. 287.

[0347] FIG. 289 shows a nucleotide sequence (SEQ ID NO:289) of a native sequence PRO69533 cDNA, wherein SEQ ID NO:289 is a clone designated herein as “DNA287261”.

[0348] FIG. 290 shows the amino acid sequence (SEQ ID NO:290) derived from the coding sequence of SEQ ID NO:289 shown in FIG. 289.

[0349] FIG. 291 shows a nucleotide sequence (SEQ ID NO:291) of a native sequence PRO69534 cDNA, wherein SEQ ID NO:291 is a clone designated herein as “DNA287262”.

[0350] FIG. 292 shows the amino acid sequence (SEQ ID NO:292) derived from the coding sequence of SEQ ID NO:291 shown in FIG. 291.

[0351] FIG. 293 shows a nucleotide sequence (SEQ ID NO:293) of a native sequence PRO54728 cDNA, wherein SEQ ID NO:293 is a clone designated herein as “DNA260982”.

[0352] FIG. 294 shows the amino acid sequence (SEQ ID NO:294) derived from the coding sequence of SEQ ID NO:293 shown in FIG. 293.

[0353] FIG. 295 shows a nucleotide sequence (SEQ ID NO:295) of a native sequence PRO70015 cDNA, wherein SEQ ID NO:295 is a clone designated herein as “DNA288253”.

[0354] FIG. 296 shows the amino acid sequence (SEQ ID NO:296) derived from the coding sequence of SEQ ID NO:295 shown in FIG. 295.

[0355] FIG. 297 shows a nucleotide sequence (SEQ ID NO:297) of a native sequence PRO69536 cDNA, wherein SEQ ID NO:297 is a clone designated herein as “DNA288254”.

[0356] FIG. 298 shows the amino acid sequence (SEQ ID NO:298) derived from the coding sequence of SEQ ID NO:297 shown in FIG. 297.

[0357] FIG. 299 shows a nucleotide sequence (SEQ ID NO:299) of a native sequence PRO69537 cDNA, wherein SEQ ID NO:299 is a clone designated herein as “DNA287265”.

[0358] FIG. 300 shows the amino acid sequence (SEQ ID NO:300) derived from the coding sequence of SEQ ID NO:299 shown in FIG. 299.

[0359] FIG. 301 shows a nucleotide sequence (SEQ ID NO:301) of a native sequence PRO37498 cDNA, wherein SEQ ID NO:301 is a clone designated herein as “DNA227035”.

[0360] FIG. 302 shows the amino acid sequence (SEQ ID NO:302) derived from the coding sequence of SEQ ID NO:301 shown in FIG. 301.

[0361] FIG. 303A-B shows a nucleotide sequence (SEQ ID NO:303A-B) of a native sequence PRO22175 cDNA, wherein SEQ ID NO:303A-B is a clone designated herein as “DNA189214”.

[0362] FIG. 304 shows the amino acid sequence (SEQ ID NO:304) derived from the coding sequence of SEQ ID NO:303A-B shown in FIG. 303A-B.

[0363] FIG. 305 shows a nucleotide sequence (SEQ ID NO:305) of a native sequence PRO69538 cDNA, wherein SEQ ID NO:305 is a clone designated herein as “DNA287266”.

[0364] FIG. 306 shows the amino acid sequence (SEQ ID NO:306) derived from the coding sequence of SEQ ID NO:305 shown in FIG. 305.

[0365] FIG. 307 shows a nucleotide sequence (SEQ ID NO:307) of a native sequence PRO37015 cDNA, wherein SEQ ID NO:307 is a clone designated herein as “DNA287267”.

[0366] FIG. 308 shows the amino acid sequence (SEQ ID NO:308) derived from the coding sequence of SEQ ID NO:307 shown in FIG. 307.

[0367] FIG. 309 shows a nucleotide sequence (SEQ ID NO:309) of a native sequence PRO12187 cDNA, wherein SEQ ID NO:309 is a clone designated herein as “DNA151799”.

[0368] FIG. 310 shows the amino acid sequence (SEQ ID NO:310) derived from the coding sequence of SEQ ID NO:309 shown in FIG. 309.

[0369] FIG. 311 shows a nucleotide sequence (SEQ ID NO:311) of a native sequence PRO69539 cDNA, wherein SEQ ID NO:311 is a clone designated herein as “DNA287268”.

[0370] FIG. 312 shows the amino acid sequence (SEQ ID NO:312) derived from the coding sequence of SEQ ID NO:311 shown in FIG. 311.

[0371] FIG. 313 shows a nucleotide sequence (SEQ ID NO:313) of a native sequence PRO69880 cDNA, wherein SEQ ID NO:313 is a clone designated herein as “DNA287632”.

[0372] FIG. 314 shows the amino acid sequence (SEQ ID NO:314) derived from the coding sequence of SEQ ID NO:313 shown in FIG. 313.

[0373] FIG. 315 shows a nucleotide sequence (SEQ ID NO:315) of a native sequence PRO69541 cDNA, wherein SEQ ID NO:315 is a clone designated herein as “DNA287270”.

[0374] FIG. 316 shows the amino acid sequence (SEQ ID NO:316) derived from the coding sequence of SEQ ID NO:315 shown in FIG. 315.

[0375] FIG. 317 shows a nucleotide sequence (SEQ ID NO:317) of a native sequence PRO69542 cDNA, wherein SEQ ID NO:317 is a clone designated herein as “DNA287271”.

[0376] FIG. 318 shows the amino acid sequence (SEQ ID NO:318) derived from the coding sequence of SEQ ID NO:317 shown in FIG. 317.

[0377] FIG. 319 shows a nucleotide sequence (SEQ ID NO:319) of a native sequence PRO69543 cDNA, wherein SEQ ID NO:319 is a clone designated herein as “DNA287272”.

[0378] FIG. 320 shows the amino acid sequence (SEQ ID NO:320) derived from the coding sequence of SEQ ID NO:319 shown in FIG. 319.

[0379] FIG. 321 shows a nucleotide sequence (SEQ ID NO:321) of a native sequence PRO70016 cDNA, wherein SEQ ID NO:321 is a clone designated herein as “DNA288255”.

[0380] FIG. 322 shows the amino acid sequence (SEQ ID NO:322) derived from the coding sequence of SEQ ID NO:321 shown in FIG. 321.

[0381] FIG. 323A-B shows a nucleotide sequence (SEQ ID NO:323A-B) of a native sequence PRO69545 cDNA, wherein SEQ ID NO:323A-B is a clone designated herein as “DNA287273”.

[0382] FIG. 324 shows the amino acid sequence (SEQ ID NO:324) derived from the coding sequence of SEQ ID NO:323A-B shown in FIG. 323A-B.

[0383] FIG. 325 shows a nucleotide sequence (SEQ ID NO:325) of a native sequence PRO50197 cDNA, wherein SEQ ID NO:325 is a clone designated herein as “DNA255115”.

[0384] FIG. 326 shows the amino acid sequence (SEQ ID NO:326) derived from the coding sequence of SEQ ID NO:325 shown in FIG. 325.

[0385] FIG. 327 shows a nucleotide sequence (SEQ ID NO:327) of a native sequence PRO69546 cDNA, wherein SEQ ID NO:327 is a clone designated herein as “DNA287274”.

[0386] FIG. 328 shows the amino acid sequence (SEQ ID NO:328) derived from the coding sequence of SEQ ID NO:327 shown in FIG. 327.

[0387] FIG. 329 shows a nucleotide sequence (SEQ ID NO:329) of a native sequence PRO69547 cDNA, wherein SEQ ID NO:329 is a clone designated herein as “DNA287275”.

[0388] FIG. 330 shows the amino acid sequence (SEQ ID NO:330) derived from the coding sequence of SEQ ID NO:329 shown in FIG. 329.

[0389] FIG. 331 shows a nucleotide sequence (SEQ ID NO:331) of a native sequence PRO69548 cDNA, wherein SEQ ID NO:331 is a clone designated herein as “DNA287276”.

[0390] FIG. 332 shows the amino acid sequence (SEQ ID NO:332) derived from the coding sequence of SEQ ID NO:331 shown in FIG. 331.

[0391] FIG. 333 shows a nucleotide sequence (SEQ ID NO:333) of a native sequence PRO69549 cDNA, wherein SEQ ID NO:333 is a clone designated herein as “DNA287277”.

[0392] FIG. 334 shows the amino acid sequence (SEQ ID NO:334) derived from the coding sequence of SEQ ID NO:333 shown in FIG. 333.

[0393] FIG. 335 shows a nucleotide sequence (SEQ ID NO:335) of a native sequence PRO69550 cDNA, wherein SEQ ID NO:335 is a clone designated herein as “DNA287278”.

[0394] FIG. 336 shows the amino acid sequence (SEQ ID NO:336) derived from the coding sequence of SEQ ID NO:335 shown in FIG. 335.

[0395] FIG. 337 shows a nucleotide sequence (SEQ ID NO:337) of a native sequence PRO69551 cDNA, wherein SEQ ID NO:337 is a clone designated herein as “DNA287279”.

[0396] FIG. 338 shows the amino acid sequence (SEQ ID NO:338) derived from the coding sequence of SEQ ID NO:337 shown in FIG. 337.

[0397] FIG. 339 shows a nucleotide sequence (SEQ ID NO:339) of a native sequence PRO69552 cDNA, wherein SEQ ID NO:339 is a clone designated herein as “DNA287280”.

[0398] FIG. 340 shows the amino acid sequence (SEQ ID NO:340) derived from the coding sequence of SEQ ID NO:339 shown in FIG. 339.

[0399] FIG. 341 shows a nucleotide sequence (SEQ ID NO:341) of a native sequence PRO37460 cDNA, wherein SEQ ID NO:341 is a clone designated herein as “DNA226997”.

[0400] FIG. 342 shows the amino acid sequence (SEQ ID NO:342) derived from the coding sequence of SEQ ID NO:341 shown in FIG. 341.

[0401] FIG. 343 shows a nucleotide sequence (SEQ ID NO:343) of a native sequence PRO42223 cDNA, wherein SEQ ID NO:343 is a clone designated herein as “DNA242927”.

[0402] FIG. 344 shows the amino acid sequence (SEQ ID NO:344) derived from the coding sequence of SEQ ID NO:343 shown in FIG. 343.

[0403] FIG. 345A-B shows a nucleotide sequence (SEQ ID NO:345A-B) of a native sequence PRO69553 cDNA, wherein SEQ ID NO:345A-B is a clone designated herein as “DNA287281 ”.

[0404] FIG. 346 shows the amino acid sequence (SEQ ID NO:346) derived from the coding sequence of SEQ ID NO:345A-B shown in FIG. 345A-B.

[0405] FIG. 347 shows a nucleotide sequence (SEQ ID NO:347) of a native sequence PRO69554 cDNA, wherein SEQ ID NO:347 is a clone designated herein as “DNA287282”.

[0406] FIG. 348 shows the amino acid sequence (SEQ ID NO:348) derived from the coding sequence of SEQ ID NO:347 shown in FIG. 347.

[0407] FIG. 349 shows a nucleotide sequence (SEQ ID NO:349) of a native sequence PRO69555 cDNA, wherein SEQ ID NO:349 is a clone designated herein as “DNA287283”.

[0408] FIG. 350 shows the amino acid sequence (SEQ ID NO:350) derived from the coding sequence of SEQ ID NO:349 shown in FIG. 349.

[0409] FIG. 351 shows a nucleotide sequence (SEQ ID NO:351) of a native sequence PRO61014 cDNA, wherein SEQ ID NO:351 is a clone designated herein as “DNA272930”.

[0410] FIG. 352 shows the amino acid sequence (SEQ ID NO:352) derived from the coding sequence of SEQ ID NO:351 shown in FIG. 351.

[0411] FIG. 353 shows a nucleotide sequence (SEQ ID NO:353) of a native sequence PRO59915 cDNA, wherein SEQ ID NO:353 is a clone designated herein as. “DNA287284”.

[0412] FIG. 354 shows the amino acid sequence (SEQ ID NO:354) derived from the coding sequence of SEQ ID NO:353 shown in FIG. 353.

[0413] FIG. 355A-B shows a nucleotide sequence (SEQ ID NO:355A-B) of a native sequence PRO37891 cDNA, wherein SEQ ID NO:355A-B is a clone designated herein as “DNA227428”.

[0414] FIG. 356 shows the amino acid sequence (SEQ ID NO:356) derived from the coding sequence of SEQ ID NO:355A-B shown in FIG. 355A-B.

[0415] FIG. 357 shows a nucleotide sequence (SEQ ID NO:357) of a native sequence PRO69556 cDNA, wherein SEQ ID NO:357 is a clone designated herein as “DNA287285”.

[0416] FIG. 358 shows the amino acid sequence (SEQ ID NO:358) derived from the coding sequence of SEQ ID NO:357 shown in FIG. 357.

[0417] FIG. 359 shows a nucleotide sequence (SEQ ID NO:359) of a native sequence PRO12875 cDNA, wherein SEQ ID NO:359 is a clone designated herein as “DNA151237”.

[0418] FIG. 360 shows the amino acid sequence (SEQ ID NO:360) derived from the coding sequence of SEQ ID NO:359 shown in FIG. 359.

[0419] FIG. 361 shows a nucleotide sequence (SEQ ID NO:361) of a native sequence PRO70017 cDNA, wherein SEQ ID NO:361 is a clone designated herein as “DNA288256”.

[0420] FIG. 362 shows the amino acid sequence (SEQ ID NO:362) derived from the coding sequence of SEQ ID NO:361 shown in FIG. 361.

[0421] FIG. 363 shows a nucleotide sequence (SEQ ID NO:363) of a native sequence PRO70018 cDNA, wherein SEQ ID NO:363 is a clone designated herein as “DNA288257”.

[0422] FIG. 364 shows the amino acid sequence (SEQ ID NO:364) derived from the coding sequence of SEQ ID NO:363 shown in FIG. 363.

[0423] FIG. 365 shows a nucleotide sequence (SEQ ID NO:365) of a native sequence PRO4426 cDNA, wherein SEQ ID NO:365 is a clone designated herein as “DNA287287”.

[0424] FIG. 366 shows the amino acid sequence (SEQ ID NO:366) derived from the coding sequence of SEQ ID NO:365 shown in FIG. 365.

[0425] FIG. 367 shows a nucleotide sequence (SEQ ID NO:367) of a native sequence PRO69558 cDNA, wherein SEQ ID NO:367 is a clone designated herein as “DNA287288”.

[0426] FIG. 368 shows the amino acid sequence (SEQ ID NO:368) derived from the coding sequence of SEQ ID NO:367 shown in FIG. 367.

[0427] FIG. 369 shows a nucleotide sequence (SEQ ID NO:369) of a native sequence PRO69559 cDNA, wherein SEQ ID NO:369 is a clone designated herein as “DNA287289”.

[0428] FIG. 370 shows the amino acid sequence (SEQ ID NO:370) derived from the coding sequence of SEQ ID NO:369 shown in FIG. 369.

[0429] FIG. 371 shows a nucleotide sequence (SEQ ID NO:371) of a native sequence PRO37676 cDNA, wherein SEQ ID NO:371 is a clone designated herein as “DNA227213”.

[0430] FIG. 372 shows the amino acid sequence (SEQ ID NO:372) derived from the coding sequence of SEQ ID NO:371 shown in FIG. 371.

[0431] FIG. 373 shows a nucleotide sequence (SEQ ID NO:373) of a native sequence PRO69560 cDNA, wherein SEQ ID NO:373 is a clone designated herein as “DNA287290”.

[0432] FIG. 374 shows the amino acid sequence (SEQ ID NO:374) derived from the coding sequence of SEQ ID NO:373 shown in FIG. 373.

[0433] FIG. 375 shows a nucleotide sequence (SEQ ID NO:375) of a native sequence PRO69561 cDNA, wherein SEQ ID NO:375 is a clone designated herein as “DNA28721”.

[0434] FIG. 376 shows the amino acid sequence (SEQ ID NO:376) derived from the coding sequence of SEQ ID NO:375 shown in FIG. 375.

[0435] FIG. 377 shows a nucleotide sequence (SEQ ID NO:377) of a native sequence PRO69562 cDNA, wherein SEQ ID NO:377 is a clone designated herein as “DNA287292”.

[0436] FIG. 378 shows the amino acid sequence (SEQ ID NO:378) derived from the coding sequence of SEQ ID NO:377 shown in FIG. 377.

[0437] FIG. 379 shows a nucleotide sequence (SEQ ID NO:379) of a native sequence PRO63204 cDNA, wherein SEQ ID NO:379 is a clone designated herein as “DNA287293”.

[0438] FIG. 380 shows the amino acid sequence (SEQ ID NO:380) derived from the coding sequence of SEQ ID NO:379 shown in FIG. 379.

[0439] FIG. 381 shows a nucleotide sequence (SEQ ID NO:381) of a native sequence PRO70019 cDNA, wherein SEQ ID NO:381 is a clone designated herein as “DNA288258”.

[0440] FIG. 382 shows the amino acid sequence (SEQ ID NO:382) derived from the coding sequence of SEQ ID NO:381 shown in FIG. 381.

[0441] FIG. 383 shows a nucleotide sequence (SEQ ID NO:383) of a native sequence PRO69564 cDNA, wherein SEQ ID NO:383 is a clone designated herein as “DNA287295”.

[0442] FIG. 384 shows the amino acid sequence (SEQ ID NO:384) derived from the coding sequence of SEQ ID NO:383 shown in FIG. 383.

[0443] FIG. 385 shows a nucleotide sequence (SEQ ID NO:385) of a native sequence PRO62830 cDNA, wherein SEQ ID NO:385 is a clone designated herein as “DNA287296”.

[0444] FIG. 386 shows the amino acid sequence (SEQ ID NO:386) derived from the coding sequence of SEQ ID NO:385 shown in FIG. 385.

[0445] FIG. 387 shows a nucleotide sequence (SEQ ID NO:387) of a native sequence PRO69565 cDNA, wherein SEQ ID NO:387 is a clone designated herein as “DNA287297”.

[0446] FIG. 388 shows the amino acid sequence (SEQ ID NO:388) derived from the coding sequence of SEQ ID NO:387 shown in FIG. 387.

[0447] FIG. 389 shows a nucleotide sequence (SEQ ID NO:389) of a native sequence PRO69566 cDNA, wherein SEQ ID NO:389 is a clone designated herein as “DNA287298”.

[0448] FIG. 390 shows the amino acid sequence (SEQ ID NO:390) derived from the coding sequence of SEQ ID NO:389 shown in FIG. 389.

[0449] FIG. 391 shows a nucleotide sequence (SEQ ID NO:39 1) of a native sequence PRO69567 cDNA, wherein SEQ ID NO:391 is a clone designated herein as “DNA287299”.

[0450] FIG. 392 shows the amino acid sequence (SEQ ID NO:392) derived from the coding sequence of SEQ ID NO:391 shown in FIG. 391.

[0451] FIG. 393 shows a nucleotide sequence (SEQ ID NO:393) of a native sequence PRO49675 cDNA, wherein SEQ ID NO:393 is a clone designated herein as “DNA254572”.

[0452] FIG. 394 shows the amino acid sequence (SEQ ID NO:394) derived from the coding sequence of SEQ ID NO:393 shown in FIG. 393.

[0453] FIG. 395 shows a nucleotide sequence (SEQ ID NO:395) of a native sequence PRO69568 cDNA, wherein SEQ ID NO:395 is a clone designated herein as “DNA287300”.

[0454] FIG. 396 shows the amino acid sequence (SEQ ID NO:396) derived from the coding sequence of SEQ ID NO:395 shown in FIG. 395.

[0455] FIG. 397 shows a nucleotide sequence (SEQ ID NO:397) of a native sequence PRO2013 cDNA, wherein SEQ ID NO:397 is a clone designated herein as “DNA75526”.

[0456] FIG. 398 shows the amino acid sequence (SEQ ID NO:398) derived from the coding sequence of SEQ ID NO:397 shown in FIG. 397.

[0457] FIG. 399 shows a nucleotide sequence (SEQ ID NO:399) of a native sequence PRO69569 cDNA, wherein SEQ ID NO:399 is a clone designated herein as “DNA287302”.

[0458] FIG. 400 shows the amino acid sequence (SEQ ID NO:400) derived from the coding sequence of SEQ ID NO:399 shown in FIG. 399.

[0459] FIG. 401 shows a nucleotide sequence (SEQ ID NO:401) of a native sequence PRO69570 cDNA, wherein SEQ ID NO:401 is a clone designated herein as “DNA287303”.

[0460] FIG. 402 shows the amino acid sequence (SEQ ID NO:402) derived from the coding sequence of SEQ ID NO:401 shown in FIG. 401.

[0461] FIG. 403 shows a nucleotide sequence (SEQ ID NO:403) of a native sequence PRO69571 cDNA, wherein SEQ ID NO:403 is a clone designated herein as “DNA287304”.

[0462] FIG. 404 shows the amino acid sequence (SEQ ID NO:404) derived from the coding sequence of SEQ ID NO:403 shown in FIG. 403.

[0463] FIG. 405A-B shows a nucleotide sequence (SEQ ID NO:405A-B) of a native sequence PRO36403 cDNA, wherein SEQ ID NO:405A-B is a clone designated herein as “DNA225940”.

[0464] FIG. 406 shows the amino acid sequence (SEQ ID NO:406) derived from the coding sequence of SEQ ID NO:405A-B shown in FIG. 405A-B.

[0465] FIG. 407 shows a nucleotide sequence (SEQ ID NO:407) of a native sequence PRO4676 cDNA, wherein SEQ ID NO:407 is a clone designated herein as “DNA288259”.

[0466] FIG. 408 shows the amino acid sequence (SEQ ID NO:408) derived from the coding sequence of SEQ ID NO:407 shown in FIG. 407.

[0467] FIG. 409 shows a nucleotide sequence (SEQ ID NO:409) of a native sequence PRO37657 cDNA, wherein SEQ ID NO:409 is a clone designated herein as “DNA227194”.

[0468] FIG. 410 shows the amino acid sequence (SEQ ID NO:410) derived from the coding sequence of SEQ ID NO:409 shown in FIG. 409.

[0469] FIG. 411 shows a nucleotide sequence (SEQ ID NO:411) of a native sequence PRO62097 cDNA, wherein SEQ ID NO:411 is a clone designated herein as “DNA274167”.

[0470] FIG. 412 shows the amino acid sequence (SEQ ID NO:412) derived from the coding sequence of SEQ ID NO:411 shown in FIG. 411.

[0471] FIG. 413 shows a nucleotide sequence (SEQ ID NO:413) of a native sequence PRO38081 cDNA, wherein SEQ ID NO:413 is a clone designated herein as “DNA227618”.

[0472] FIG. 414 shows the amino acid sequence (SEQ ID NO:414) derived from the coding sequence of SEQ ID NO:413 shown in FIG. 413.

[0473] FIG. 415 shows a nucleotide sequence (SEQ ID NO:415) of a native sequence PRO69572 cDNA, wherein SEQ ID NO:415 is a clone designated herein as “DNA287306”.

[0474] FIG. 416 shows the amino acid sequence (SEQ ID NO:416) derived from the coding sequence of SEQ ID NO:415 shown in FIG. 415.

[0475] FIG. 417 shows a nucleotide sequence (SEQ ID NO:417) of a native sequence PRO69573 cDNA, wherein SEQ ID NO:417 is a clone designated herein as “DNA287307”.

[0476] FIG. 418 shows the amino acid sequence (SEQ ID NO:418) derived from the coding sequence of SEQ ID NO:417 shown in FIG. 417.

[0477] FIG. 419 shows a nucleotide sequence (SEQ ID NO:419) of a native sequence PRO69574 cDNA, wherein SEQ ID NO:419 is a clone designated herein as “DNA287308”.

[0478] FIG. 420 shows the amino acid sequence (SEQ ID NO:420) derived from the coding sequence of SEQ ID NO:419 shown in FIG. 419.

[0479] FIG. 421 shows a nucleotide sequence (SEQ ID NO:421) of a native sequence PRO69883 cDNA, wherein SEQ ID NO:421 is a clone designated herein as “DNA287635”.

[0480] FIG. 422 shows the amino acid sequence (SEQ ID NO:422) derived from the coding sequence of SEQ ID NO:421 shown in FIG. 421.

[0481] FIG. 423 shows a nucleotide sequence (SEQ ID NO:423) of a native sequence PRO69576 cDNA, wherein SEQ ID NO:423 is a clone designated herein as “DNA287310”.

[0482] FIG. 424 shows the amino acid sequence (SEQ ID NO:424) derived from the coding sequence of SEQ ID NO:423 shown in FIG. 423.

[0483] FIG. 425 shows a nucleotide sequence (SEQ ID NO:425) of a native sequence PRO37584 cDNA, wherein SEQ ID NO:425 is a clone designated herein as “DNA227121 ”.

[0484] FIG. 426 shows the amino acid sequence (SEQ ID NO:426) derived from the coding sequence of SEQ ID NO:425 shown in FIG. 425.

[0485] FIG. 427 shows a nucleotide sequence (SEQ ID NO:427) of a native sequence PRO11603 cDNA, wherein SEQ ID NO:427 is a clone designated herein as “DNA151007”.

[0486] FIG. 428 shows the amino acid sequence (SEQ ID NO:428) derived from the coding sequence of SEQ ID NO:427 shown in FIG. 427.

[0487] FIG. 429 shows a nucleotide sequence (SEQ ID NO:429) of a native sequence PRO70020 cDNA, wherein SEQ ID NO:429 is a clone designated herein as “DNA288260”.

[0488] FIG. 430 shows the amino acid sequence (SEQ ID NO:430) derived from the coding sequence of SEQ ID NO:429 shown in FIG. 429.

[0489] FIG. 431 shows a nucleotide sequence (SEQ ID NO:431) of a native sequence PRO51695 cDNA, wherein SEQ ID NO:431 is a clone designated herein as “DNA256762”.

[0490] FIG. 432 shows the amino acid sequence (SEQ ID NO:432) derived from the coding sequence of SEQ ID NO:431 shown in FIG. 431.

[0491] FIG. 433 shows a nucleotide sequence (SEQ ID NO:433) of a native sequence PRO69579 cDNA, wherein SEQ ID NO:433 is a clone designated herein as “DNA287314”.

[0492] FIG. 434 shows the amino acid sequence (SEQ ID NO:434) derived from the coding sequence of SEQ ID NO:433 shown in FIG. 433.

[0493] FIG. 435 shows a nucleotide sequence (SEQ ID NO:435) of a native sequence PRO69580 cDNA, wherein SEQ ID NO:435 is a clone designated herein as “DNA287315”.

[0494] FIG. 436 shows the amino acid sequence (SEQ ID NO:436) derived from the coding sequence of SEQ ID NO:435 shown in FIG. 435.

[0495] FIG. 437 shows a nucleotide sequence (SEQ ID NO:437) of a native sequence PRO69581 cDNA, wherein SEQ ID NO:437 is a clone designated herein as “DNA287316”.

[0496] FIG. 438 shows the amino acid sequence (SEQ ID NO:438) derived from the coding sequence of SEQ ID NO:437 shown in FIG. 437.

[0497] FIG. 439 shows a nucleotide sequence (SEQ ID NO:439) of a native sequence PRO69582 cDNA, wherein SEQ ID NO:439 is a clone designated herein as “DNA287317”.

[0498] FIG. 440 shows the amino acid sequence (SEQ ID NO:440) derived from the coding sequence of SEQ ID NO:439 shown in FIG. 439.

[0499] FIG. 441 shows a nucleotide sequence (SEQ ID NO:441) of a native sequence PRO69583 cDNA, wherein SEQ ID NO:441 is a clone designated herein as “DNA287318”.

[0500] FIG. 442 shows the amino acid sequence (SEQ ID NO:442) derived from the coding sequence of SEQ ID NO:441 shown in FIG. 441.

[0501] FIG. 443 shows a nucleotide sequence (SEQ ID NO:443) of a native sequence PRO69584 cDNA, wherein SEQ ID NO:443 is a clone designated herein as “DNA287319”.

[0502] FIG. 444 shows the amino acid sequence (SEQ ID NO:444) derived from the coding sequence of SEQ ID NO:443 shown in FIG. 443.

[0503] FIG. 445 shows a nucleotide sequence (SEQ ID NO:445) of a native sequence PRO69585 cDNA, wherein SEQ ID NO:445 is a clone designated herein as “DNA287320”.

[0504] FIG. 446 shows the amino acid sequence (SEQ ID NO:446) derived from the coding sequence of SEQ ID NO:445 shown in FIG. 445.

[0505] FIG. 447 shows a nucleotide sequence (SEQ ID NO:447) of a native sequence PRO69586 cDNA, wherein SEQ ID NO:447 is a clone designated herein as “DNA287321”.

[0506] FIG. 448 shows the amino acid sequence (SEQ ID NO:448) derived from the coding sequence of SEQ ID NO:447 shown in FIG. 447.

[0507] FIG. 449 shows a nucleotide sequence (SEQ ID NO:449) of a native sequence PRO69587 cDNA, wherein SEQ ID NO:449 is a clone designated herein as “DNA287322”.

[0508] FIG. 450 shows the amino acid sequence (SEQ ID NO:450) derived from the coding sequence of SEQ ID NO:449 shown in FIG. 449.

[0509] FIG. 451 shows a nucleotide sequence (SEQ ID NO:45 1) of a native sequence PRO69588 cDNA, wherein SEQ ID NO:451 is a clone designated herein as “DNA287323”.

[0510] FIG. 452 shows the amino acid sequence (SEQ ID NO:452) derived from the coding sequence of SEQ ID NO:451 shown in FIG. 451.

[0511] FIG. 453 shows a nucleotide sequence (SEQ ID NO:453) of a native sequence PRO69589 cDNA, wherein SEQ ID NO:453 is a clone designated herein as “DNA287637”.

[0512] FIG. 454 shows the amino acid sequence (SEQ ID NO:454) derived from the coding sequence of SEQ ID NO:453 shown in FIG. 453.

[0513] FIG. 455A-B shows a nucleotide sequence (SEQ ID NO:455A-B) of a native sequence PRO70021 cDNA, wherein SEQ ID NO:455A-B is a clone designated herein as “DNA288261”.

[0514] FIG. 456 shows the amino acid sequence (SEQ ID NO:456) derived from the coding sequence of SEQ ID NO:455A-B shown in FIG. 455A-B.

[0515] FIG. 457 shows a nucleotide sequence (SEQ ID NO:457) of a native sequence PRO69590 cDNA, wherein SEQ ID NO:457 is a clone designated herein as “DNA288262”.

[0516] FIG. 458 shows the amino acid sequence (SEQ ID NO:458) derived from the coding sequence of SEQ ID NO:457 shown in FIG. 457.

[0517] FIG. 459 shows a nucleotide sequence (SEQ ID NO:459) of a native sequence PRO70022 cDNA, wherein SEQ ID NO:459 is a clone designated herein as “DNA288263”.

[0518] FIG. 460 shows the amino acid sequence (SEQ ID NO:460) derived from the coding sequence of SEQ ID NO:459 shown in FIG. 459.

[0519] FIG. 461A-B shows a nucleotide sequence (SEQ ID NO:461A-B) of a native sequence PRO69592 cDNA, wherein SEQ ID NO:461A-B is a clone designated herein as “DNA287327”.

[0520] FIG. 462 shows the amino acid sequence (SEQ ID NO:462) derived from the coding sequence of SEQ ID NO:461A-B shown in FIG. 461 A-B.

[0521] FIG. 463 shows a nucleotide sequence (SEQ ID NO:463) of a native sequence PRO37029 cDNA, wherein SEQ ID NO:463 is a clone designated herein as “DNA287328”.

[0522] FIG. 464 shows the amino acid sequence (SEQ ID NO:464) derived from the coding sequence of SEQ ID NO:463 shown in FIG. 463.

[0523] FIG. 465 shows a nucleotide sequence (SEQ ID NO:465) of a native sequence PRO69593 cDNA, wherein SEQ ID NO:465 is a clone designated herein as “DNA287329”.

[0524] FIG. 466 shows the amino acid sequence (SEQ ID NO:466) derived from the coding sequence of SEQ ID NO:465 shown in FIG. 465.

[0525] FIG. 467A-B shows a nucleotide sequence (SEQ ID NO:467A-B) of a native sequence PRO69594 cDNA, wherein SEQ ID NO:467A-B is a clone designated herein as “DNA287330”.

[0526] FIG. 468 shows the amino acid sequence (SEQ ID NO:468) derived from the coding sequence of SEQ ID NO:467A-B shown in FIG. 467A-B.

[0527] FIG. 469 shows a nucleotide sequence (SEQ ID NO:469) of a native sequence PRO69595 cDNA, wherein SEQ ID NO:469 is a clone designated herein as “DNA287331 ”.

[0528] FIG. 470 shows the amino acid sequence (SEQ ID NO:470) derived from the coding sequence of SEQ ID NO:469 shown in FIG. 469.

[0529] FIG. 471 shows a nucleotide sequence (SEQ ID NO:471) of a native sequence PRO1207 cDNA, wherein SEQ ID NO:471 is a clone designated herein as “DNA66480”.

[0530] FIG. 472 shows the amino acid sequence (SEQ ID NO:472) derived from the coding sequence of SEQ ID NO:471 shown in FIG. 471.

[0531] FIG. 473 shows a nucleotide sequence (SEQ ID NO:473) of a native sequence PRO69596 cDNA, wherein SEQ ID NO:473 is a clone designated herein as “DNA287332”.

[0532] FIG. 474 shows the amino acid sequence (SEQ ID NO:474) derived from the coding sequence of SEQ ID NO:473 shown in FIG. 473.

[0533] FIG. 475 shows a nucleotide sequence (SEQ ID NO:475) of a native sequence PRO69597 cDNA, wherein SEQ ID NO:475 is a clone designated herein as “DNA287333”.

[0534] FIG. 476 shows the amino acid sequence (SEQ ID NO:476) derived from the coding sequence of SEQ ID NO:475 shown in FIG. 475.

[0535] FIG. 477 shows a nucleotide sequence (SEQ ID NO:477) of a native sequence PRO51139 cDNA, wherein SEQ ID NO:477 is a clone designated herein as “DNA256089”.

[0536] FIG. 478 shows the amino acid sequence (SEQ ID NO:478) derived from the coding sequence of SEQ ID NO:477 shown in FIG. 477.

[0537] FIG. 479 shows a nucleotide sequence (SEQ ID NO:479) of a native sequence PRO62545 cDNA, wherein SEQ ID NO:479 is a clone designated herein as “DNA274778”.

[0538] FIG. 480 shows the amino acid sequence (SEQ ID NO:480) derived from the coding sequence of SEQ ID NO:479 shown in FIG. 479.

[0539] FIG. 481 shows a nucleotide sequence (SEQ ID NO:481) of a native sequence PRO3615 cDNA, wherein SEQ ID NO:481 is a clone designated herein as “DNA287334”.

[0540] FIG. 482 shows the amino acid sequence (SEQ ID NO:482) derived from the coding sequence of SEQ ID NO:481 shown in FIG. 481.

[0541] FIG. 483 shows a nucleotide sequence (SEQ ID NO:483) of a native sequence PRO38036 cDNA, wherein SEQ ID NO:483 is a clone designated herein as “DNA227573”.

[0542] FIG. 484 shows the amino acid sequence (SEQ ID NO:484) derived from the coding sequence of SEQ ID NO:483 shown in FIG. 483.

[0543] FIG. 485 shows a nucleotide sequence (SEQ ID NO:485) of a native sequence PRO69598 cDNA, wherein SEQ ID NO:485 is a clone designated herein as “DNA287335”.

[0544] FIG. 486 shows the amino acid sequence (SEQ ID NO:486) derived from the coding sequence of SEQ ID NO:485 shown in FIG. 485.

[0545] FIG. 487 shows a nucleotide sequence (SEQ ID NO:487) of a native sequence PRO4701 cDNA, wherein SEQ ID NO:487 is a clone designated herein as “DNA103371 ”.

[0546] FIG. 488 shows the amino acid sequence (SEQ ID NO:488) derived from the coding sequence of SEQ ID NO:487 shown in FIG. 487.

[0547] FIG. 489 shows a nucleotide sequence (SEQ ID NO:489) of a native sequence PRO69599 cDNA, wherein SEQ ID NO:489 is a clone designated herein as “DNA287336”.

[0548] FIG. 490 shows the amino acid sequence (SEQ ID NO:490) derived from the coding sequence of SEQ ID NO:489 shown in FIG. 489.

[0549] FIG. 491 shows a nucleotide sequence (SEQ ID NO:49 1) of a native sequence PRO69600 cDNA, wherein SEQ ID NO:491 is a clone designated herein as “DNA287337”.

[0550] FIG. 492 shows the amino acid sequence (SEQ ID NO:492) derived from the coding sequence of SEQ ID NO:491 shown in FIG. 491.

[0551] FIG. 493 shows a nucleotide sequence (SEQ ID NO:493) of a native sequence PRO69601 cDNA, wherein SEQ ID NO:493 is a clone designated herein as “DNA287338”.

[0552] FIG. 494 shows the amino acid sequence (SEQ ID NO:494) derived from the coding sequence of SEQ ID NO:493 shown in FIG. 493.

[0553] FIG. 495 shows a nucleotide sequence (SEQ ID NO:495) of a native sequence PRO69887 cDNA, wherein SEQ ID NO:495 is a clone designated herein as “DNA287640”.

[0554] FIG. 496 shows the amino acid sequence (SEQ ID NO:496) derived from the coding sequence of SEQ ID NO:495 shown in FIG. 495.

[0555] FIG. 497 shows a nucleotide sequence (SEQ ID NO:497) of a native sequence PRO69603 cDNA, wherein SEQ ID NO:497 is a clone designated herein as “DNA287340”.

[0556] FIG. 498 shows the amino acid sequence (SEQ ID NO:498) derived from the coding sequence of SEQ ID NO:497 shown in FIG. 497.

[0557] FIG. 499 shows a nucleotide sequence (SEQ ID NO:499) of a native sequence PRO69604 cDNA, wherein SEQ ID NO:499 is a clone designated herein as “DNA287341”.

[0558] FIG. 500 shows the amino acid sequence (SEQ ID NO:500) derived from the coding sequence of SEQ ID NO:499 shown in FIG. 499.

[0559] FIG. 501 shows a nucleotide sequence (SEQ ID NO:501) of a native sequence PRO70023 cDNA, wherein SEQ ID NO:501 is a clone designated herein as “DNA288264”.

[0560] FIG. 502 shows the amino acid sequence (SEQ ID NO:502) derived from the coding sequence of SEQ ID NO:501 shown in FIG. 501.

[0561] FIG. 503 shows a nucleotide sequence (SEQ ID NO:503) of a native sequence PRO69606 cDNA, wherein SEQ ID NO:503 is a clone designated herein as “DNA287343”.

[0562] FIG. 504 shows the amino acid sequence (SEQ ID NO:504) derived from the coding sequence of SEQ ID NO:503 shown in FIG. 503.

[0563] FIG. 505 shows a nucleotide sequence (SEQ ID NO:505) of a native sequence PRO69607 cDNA, wherein SEQ ID NO:505 is a clone designated herein as “DNA287344”.

[0564] FIG. 506 shows the amino acid sequence (SEQ ID NO:506) derived from the coding sequence of SEQ ID NO:505 shown in FIG. 505.

[0565] FIG. 507 shows a nucleotide sequence (SEQ ID NO:507) of a native sequence PRO69608 cDNA, wherein SEQ ID NO:507 is a clone designated herein as “DNA287345”.

[0566] FIG. 508 shows the amino acid sequence (SEQ ID NO:508) derived from the coding sequence of SEQ ID NO:507 shown in FIG. 507.

[0567] FIG. 509 shows a nucleotide sequence (SEQ ID NO:509) of a native sequence PRO69609 cDNA, wherein SEQ ID NO:509 is a clone designated herein as “DNA287346”.

[0568] FIG. 510 shows the amino acid sequence (SEQ ID NO:510) derived from the coding sequence of SEQ ID NO:509 shown in FIG. 509.

[0569] FIG. 511 shows a nucleotide sequence (SEQ ID NO:511) of a native sequence PRO69610 cDNA, wherein SEQ ID NO:511 is a clone designated herein as “DNA287347”.

[0570] FIG. 512 shows the amino acid sequence (SEQ ID NO:512) derived from the coding sequence of SEQ ID NO:511 shown in FIG. 511.

[0571] FIG. 513 shows a nucleotide sequence (SEQ ID NO:513) of a native sequence PRO9902 cDNA, wherein SEQ ID NO:513 is a clone designated herein as “DNA287642”.

[0572] FIG. 514 shows the amino acid sequence (SEQ ID NO:514) derived from the coding sequence of SEQ ID NO:513 shown in FIG. 513.

[0573] FIG. 515 shows a nucleotide sequence (SEQ ID NO:515) of a native sequence PRO69611 cDNA, wherein SEQ ID NO:515 is a clone designated herein as “DNA287349”.

[0574] FIG. 516 shows the amino acid sequence (SEQ ID NO:516) derived from the coding sequence of SEQ ID NO:515 shown in FIG. 515.

[0575] FIG. 517 shows a nucleotide sequence (SEQ ID NO:517) of a native sequence PRO69612 cDNA, wherein SEQ ID NO:517 is a clone designated herein as “DNA287350”.

[0576] FIG. 518 shows the amino acid sequence (SEQ ID NO:518) derived from the coding sequence of SEQ ID NO:517 shown in FIG. 517.

[0577] FIG. 519 shows a nucleotide sequence (SEQ ID NO:519) of a native sequence PRO69613 cDNA, wherein SEQ ID NO:519 is a clone designated herein as “DNA287351”.

[0578] FIG. 520 shows the amino acid sequence (SEQ ID NO:520) derived from the coding sequence of SEQ ID NO:519 shown in FIG. 519.

[0579] FIG. 521 shows a nucleotide sequence (SEQ ID NO:521) of a native sequence PRO69614 cDNA, wherein SEQ ID NO:521 is a clone designated herein as “DNA287352”.

[0580] FIG. 522 shows the amino acid sequence (SEQ ID NO:522) derived from the coding sequence of SEQ ID NO:521 shown in FIG. 521.

[0581] FIG. 523 shows a nucleotide sequence (SEQ ID NO:523) of a native sequence PRO69615 cDNA, wherein SEQ ID NO:523 is a clone designated herein as “DNA287643”.

[0582] FIG. 524 shows the amino acid sequence (SEQ ID NO:524) derived from the coding sequence of SEQ ID NO:523 shown in FIG. 523.

[0583] FIG. 525 shows a nucleotide sequence (SEQ ID NO:525) of a native sequence PRO70024 cDNA, wherein SEQ ID NO:525 is a clone designated herein as “DNA288265”.

[0584] FIG. 526 shows the amino acid sequence (SEQ ID NO:526) derived from the coding sequence of SEQ ID NO:525 shown in FIG. 525.

[0585] FIG. 527 shows a nucleotide sequence (SEQ ID NO:527) of a native sequence PRO69616 cDNA, wherein SEQ ID NO:527 is a clone designated herein as “DNA287354”.

[0586] FIG. 528 shows the amino acid sequence (SEQ ID NO:528) derived from the coding sequence of SEQ ID NO:527 shown in FIG. 527.

[0587] FIG. 529 shows a nucleotide sequence (SEQ ID NO:529) of a native sequence PRO49619 cDNA, wherein SEQ ID NO:529 is a clone designated herein as “DNA254512”.

[0588] FIG. 530 shows the amino acid sequence (SEQ ID NO:530) derived from the coding sequence of SEQ ID NO:529 shown in FIG. 529.

[0589] FIG. 531 shows a nucleotide sequence (SEQ ID NO:531) of a native sequence PRO69617 cDNA, wherein SEQ ID NO:531 is a clone designated herein as “DNA287355”.

[0590] FIG. 532 shows the amino acid sequence (SEQ ID NO:532) derived from the coding sequence of SEQ ID NO:531 shown in FIG. 531.

[0591] FIG. 533 shows a nucleotide sequence (SEQ ID NO:533) of a native sequence PRO69618 cDNA, wherein SEQ ID NO:533 is a clone designated herein as “DNA287356”.

[0592] FIG. 534 shows the amino acid sequence (SEQ ID NO:534) derived from the coding sequence of SEQ ID NO:533 shown in FIG. 533.

[0593] FIG. 535 shows a nucleotide sequence (SEQ ID NO:535) of a native sequence PRO38040 cDNA, wherein SEQ ID NO:535 is a clone designated herein as “DNA227577”.

[0594] FIG. 536 shows the amino acid sequence (SEQ ID NO:536) derived from the coding sequence of SEQ ID NO:535 shown in FIG. 535.

[0595] FIG. 537 shows a nucleotide sequence (SEQ ID NO:537) of a native sequence PRO69619 cDNA, wherein SEQ ID NO:537 is a clone designated herein as “DNA287357”.

[0596] FIG. 538 shows the amino acid sequence (SEQ ID NO:538) derived from the coding sequence of SEQ ID NO:537 shown in FIG. 537.

[0597] FIG. 539 shows a nucleotide sequence (SEQ ID NO:539) of a native sequence PRO69620 cDNA, wherein SEQ ID NO:539 is a clone designated herein as “DNA287358”.

[0598] FIG. 540 shows the amino acid sequence (SEQ ID NO:540) derived from the coding sequence of SEQ ID NO:539 shown in FIG. 539.

[0599] FIG. 541 shows a nucleotide sequence (SEQ ID NO:541) of a native sequence PRO69621 cDNA, wherein SEQ ID NO:541 is a clone designated herein as “DNA287359”.

[0600] FIG. 542 shows the amino acid sequence (SEQ ID NO:542) derived from the coding sequence of SEQ ID NO:541 shown in FIG. 541.

[0601] FIG. 543A-B shows a nucleotide sequence (SEQ ID NO:543A-B) of a native sequence PRO69622 cDNA, wherein SEQ ID NO:543A-B is a clone designated herein as “DNA287360”.

[0602] FIG. 544 shows the amino acid sequence (SEQ ID NO:544) derived from the coding sequence of SEQ ID NO:543A-B shown in FIG. 543A-B.

[0603] FIG. 545 shows a nucleotide sequence (SEQ ID NO:545) of a native sequence PRO4401 cDNA, wherein SEQ ID NO:545 is a clone designated herein as “DNA287362”.

[0604] FIG. 546 shows the amino acid sequence (SEQ ID NO:546) derived from the coding sequence of SEQ ID NO:545 shown in FIG. 545.

[0605] FIG. 547 shows a nucleotide sequence (SEQ ID NO:547) of a native sequence PRO70025 cDNA, wherein SEQ ID NO:547 is a clone designated herein as “DNA288266”.

[0606] FIG. 548 shows the amino acid sequence (SEQ ID NO:548) derived from the coding sequence of SEQ ID NO:547 shown in FIG. 547.

[0607] FIG. 549 shows a nucleotide sequence (SEQ ID NO:549) of a native sequence PRO69625 cDNA, wherein SEQ ID NO:549 is a clone designated herein as “DNA287364”.

[0608] FIG. 550 shows the amino acid sequence (SEQ ID NO:550) derived from the coding sequence of SEQ ID NO:549 shown in FIG. 549.

[0609] FIG. 551 shows a nucleotide sequence (SEQ ID NO:55 1) of a native sequence PRO12025 cDNA, wherein SEQ ID NO:551 is a clone designated herein as “DNA288267”.

[0610] FIG. 552 shows the amino acid sequence (SEQ ID NO:552) derived from the coding sequence of SEQ ID NO:551 shown in FIG. 551.

[0611] FIG. 553 shows a nucleotide sequence (SEQ ID NO:553) of a native sequence PRO70026 cDNA, wherein SEQ ID NO:553 is a clone designated herein as “DNA288268”.

[0612] FIG. 554 shows the amino acid sequence (SEQ ID NO:554) derived from the coding sequence of SEQ ID NO:553 shown in FIG. 553.

[0613] FIG. 555 shows a nucleotide sequence (SEQ ID NO:555) of a native sequence PRO69627 cDNA, wherein SEQ ID NO:555 is a clone designated herein as “DNA287367”.

[0614] FIG. 556 shows the amino acid sequence (SEQ ID NO:556) derived from the coding sequence of SEQ ID NO:555 shown in FIG. 555.

[0615] FIG. 557 shows a nucleotide sequence (SEQ ID NO:557) of a native sequence PRO69628 cDNA, wherein SEQ ID NO:557 is a clone designated herein as “DNA287368”.

[0616] FIG. 558 shows the amino acid sequence (SEQ ID NO:558) derived from the coding sequence of SEQ ID NO:557 shown in FIG. 557.

[0617] FIG. 559 shows a nucleotide sequence (SEQ ID NO:559) of a native sequence PRO22637 cDNA, wherein SEQ ID NO:559 is a clone designated herein as “DNA 189703”.

[0618] FIG. 560 shows the amino acid sequence (SEQ ID NO:560) derived from the coding sequence of SEQ ID NO:559 shown in FIG. 559.

[0619] FIG. 561A-B shows a nucleotide sequence (SEQ ID NO:561A-B) of a native sequence PRO69629 cDNA, wherein SEQ ID NO:561A-B is a clone designated herein as “DNA287369”.

[0620] FIG. 562 shows the amino acid sequence (SEQ ID NO:562) derived from the coding sequence of SEQ ID NO:561A-B shown in FIG. 561 A-B.

[0621] FIG. 563 shows a nucleotide sequence (SEQ ID NO:563) of a native sequence PRO70027 cDNA, wherein SEQ ID NO:563 is a clone designated herein as “DNA288269”.

[0622] FIG. 564 shows the amino acid sequence (SEQ ID NO:564) derived from the coding sequence of SEQ ID NO:563 shown in FIG. 563.

[0623] FIG. 565 shows a nucleotide sequence (SEQ ID NO:565) of a native sequence PRO70028 cDNA, wherein SEQ ID NO:565 is a clone designated herein as “DNA288270”.

[0624] FIG. 566 shows the amino acid sequence (SEQ ID NO:566) derived from the coding sequence of SEQ ID NO:565 shown in FIG. 565.

[0625] FIG. 567 shows a nucleotide sequence (SEQ ID NO:567) of a native sequence PRO69632 cDNA, wherein SEQ ID NO:567 is a clone designated herein as “DNA287372”.

[0626] FIG. 568 shows the amino acid sequence (SEQ ID NO:568) derived from the coding sequence of SEQ ID NO:567 shown in FIG. 567.

[0627] FIG. 569 shows a nucleotide sequence (SEQ ID NO:569) of a native sequence PRO69634 cDNA, wherein SEQ ID NO:569 is a clone designated herein as “DNA287374”.

[0628] FIG. 570 shows the amino acid sequence (SEQ ID NO:570) derived from the coding sequence of SEQ ID NO:569 shown in FIG. 569.

[0629] FIG. 571 shows a nucleotide sequence (SEQ ID NO:571) of a native sequence PRO36857 cDNA, wherein SEQ ID NO:571 is a clone designated herein as “DNA226394”.

[0630] FIG. 572 shows the amino acid sequence (SEQ ID NO:572) derived from the coding sequence of SEQ ID NO:571 shown in FIG. 571.

[0631] FIG. 573 shows a nucleotide sequence (SEQ ID NO:573) of a native sequence PRO69893 cDNA, wherein SEQ ID NO:573 is a clone designated herein as “DNA287648”.

[0632] FIG. 574 shows the amino acid sequence (SEQ ID NO:574) derived from the coding sequence of SEQ ID NO:573 shown in FIG. 573.

[0633] FIG. 575 shows a nucleotide sequence (SEQ ID NO:575) of a native sequence PRO69635 cDNA, wherein SEQ ID NO:575 is a clone designated herein as “DNA287375”.

[0634] FIG. 576 shows the amino acid sequence (SEQ ID NO:576) derived from the coding sequence of SEQ ID NO:575 shown in FIG. 575.

[0635] FIG. 577 shows a nucleotide sequence (SEQ ID NO:577) of a native sequence PRO6180 cDNA, wherein SEQ ID NO:577 is a clone designated herein as “DNA287376”.

[0636] FIG. 578 shows the amino acid sequence (SEQ ID NO:578) derived from the coding sequence of SEQ ID NO:577 shown in FIG. 577.

[0637] FIG. 579 shows a nucleotide sequence (SEQ ID NO:579) of a native sequence PRO69637 cDNA, wherein SEQ ID NO:579 is a clone designated herein as “DNA287378”.

[0638] FIG. 580 shows the amino acid sequence (SEQ ID NO:580) derived from the coding sequence of SEQ ID NO:579 shown in FIG. 579.

[0639] FIG. 581 shows a nucleotide sequence (SEQ ID NO:581) of a native sequence PRO69638 cDNA, wherein SEQ ID NO:581 is a clone designated herein as “DNA287379”.

[0640] FIG. 582 shows the amino acid sequence (SEQ ID NO:582) derived from the coding sequence of SEQ ID NO:581 shown in FIG. 581.

[0641] FIG. 583 shows a nucleotide sequence (SEQ ID NO:583) of a native sequence PRO69639 cDNA, wherein SEQ ID NO:583 is a clone designated herein as “DNA287380”.

[0642] FIG. 584 shows the amino acid sequence (SEQ ID NO:584) derived from the coding sequence of SEQ ID NO:583 shown in FIG. 583.

[0643] FIG. 585 shows a nucleotide sequence (SEQ ID NO:585) of a native sequence PRO69640 cDNA, wherein SEQ ID NO:585 is a clone designated herein as “DNA287381 ”.

[0644] FIG. 586 shows the amino acid sequence (SEQ ID NO:586) derived from the coding sequence of SEQ ID NO:585 shown in FIG. 585.

[0645] FIG. 587 shows a nucleotide sequence (SEQ ID NO:587) of a native sequence PRO69641 cDNA, wherein SEQ ID NO:587 is a clone designated herein as “DNA287382”.

[0646] FIG. 588 shows the amino acid sequence (SEQ ID NO:588) derived from the coding sequence of SEQ ID NO:587 shown in FIG. 587.

[0647] FIG. 589 shows a nucleotide sequence (SEQ ID NO:589) of a native sequence PRO62766 cDNA, wherein SEQ ID NO:589 is a clone designated herein as “DNA275043”.

[0648] FIG. 590 shows the amino acid sequence (SEQ ID NO:590) derived from the coding sequence of SEQ ID NO:589 shown in FIG. 589.

[0649] FIG. 591 shows a nucleotide sequence (SEQ ID NO:591) of a native sequence PRO53782 cDNA, wherein SEQ ID NO:591 is a clone designated herein as “DNA287383”.

[0650] FIG. 592 shows the amino acid sequence (SEQ ID NO:592) derived from the coding sequence of SEQ ID NO:591 shown in FIG. 591.

[0651] FIG. 593 shows a nucleotide sequence (SEQ ID NO:593) of a native sequence PRO61472 cDNA, wherein SEQ ID NO:593 is a clone designated herein as “DNA273489”.

[0652] FIG. 594 shows the amino acid sequence (SEQ ID NO:594) derived from the coding sequence of SEQ ID NO:593 shown in FIG. 593.

[0653] FIG. 595 shows a nucleotide sequence (SEQ ID NO:595) of a native sequence PRO38179 cDNA, wherein SEQ ID NO:595 is a clone designated herein as “DNA227716”.

[0654] FIG. 596 shows the amino acid sequence (SEQ ID NO:596) derived from the coding sequence of SEQ ID NO:595 shown in FIG. 595.

[0655] FIG. 597 shows a nucleotide sequence (SEQ ID NO:597) of a native sequence PRO69642 cDNA, wherein SEQ ID NO:597 is a clone designated herein as “DNA287384”.

[0656] FIG. 598 shows the amino acid sequence (SEQ ID NO:598) derived from the coding sequence of SEQ ID NO:597 shown in FIG. 597.

[0657] FIG. 599 shows a nucleotide sequence (SEQ ID NO:599) of a native sequence PRO69643 cDNA, wherein SEQ ID NO:599 is a clone designated herein as “DNA287385”.

[0658] FIG. 600 shows the amino acid sequence (SEQ ID NO:600) derived from the coding sequence of SEQ ID NO:599 shown in FIG. 599.

[0659] FIG. 601 shows a nucleotide sequence (SEQ ID NO:601) of a native sequence PRO69644 cDNA, wherein SEQ ID NO:601 is a clone designated herein as “DNA287386”.

[0660] FIG. 602 shows the amino acid sequence (SEQ ID NO:602) derived from the coding sequence of SEQ ID NO:601 shown in FIG. 601.

[0661] FIG. 603 shows a nucleotide sequence (SEQ ID NO:603) of a native sequence PRO69645 cDNA, wherein SEQ ID NO:603 is a clone designated herein as “DNA287387”.

[0662] FIG. 604 shows the amino acid sequence (SEQ ID NO:604) derived from the coding sequence of SEQ ID NO:603 shown in FIG. 603.

[0663] FIG. 605 shows a nucleotide sequence (SEQ ID NO:605) of a native sequence PRO11608 cDNA, wherein SEQ ID NO:605 is a clone designated herein as “DNA151077”.

[0664] FIG. 606 shows the amino acid sequence (SEQ ID NO:606) derived from the coding sequence of SEQ ID NO:605 shown in FIG. 605.

[0665] FIG. 607 shows a nucleotide sequence (SEQ ID NO:607) of a native sequence PRO69646 cDNA, wherein SEQ ID NO:607 is a clone designated herein as “DNA287388”.

[0666] FIG. 608 shows the amino acid sequence (SEQ ID NO:608) derived from the coding sequence of SEQ ID NO:607 shown in FIG. 607.

[0667] FIG. 609 shows a nucleotide sequence (SEQ ID NO:609) of a native sequence PRO59825 cDNA, wherein SEQ ID NO:609 is a clone designated herein as “DNA271536”.

[0668] FIG. 610 shows the amino acid sequence (SEQ ID NO:610) derived from the coding sequence of SEQ ID NO:609 shown in FIG. 609.

[0669] FIG. 611 shows a nucleotide sequence (SEQ ID NO:611) of a native sequence PRO69647 cDNA, wherein SEQ ID NO:611 is a clone designated herein as “DNA287389”.

[0670] FIG. 612 shows the amino acid sequence (SEQ ID NO:612) derived from the coding sequence of SEQ ID NO:611 shown in FIG. 611.

[0671] FIG. 613 shows a nucleotide sequence (SEQ ID NO:613) of a native sequence PRO69648 cDNA, wherein SEQ ID NO:613 is a clone designated herein as “DNA287390”.

[0672] FIG. 614 shows the amino acid sequence (SEQ ID NO:614) derived from the coding sequence of SEQ ID NO:613 shown in FIG. 613.

[0673] FIG. 615 shows a nucleotide sequence (SEQ ID NO:615) of a native sequence PRO70029 cDNA, wherein SEQ ID NO:615 is a clone designated herein as “DNA288271”.

[0674] FIG. 616 shows the amino acid sequence (SEQ ID NO:616) derived from the coding sequence of SEQ ID NO:615 shown in FIG. 615.

[0675] FIG. 617 shows a nucleotide sequence (SEQ ID NO:617) of a native sequence PRO1213 cDNA, wherein SEQ ID NO:617 is a clone designated herein as “DNA66487”.

[0676] FIG. 618 shows the amino acid sequence (SEQ ID NO:618) derived from the coding sequence of SEQ ID NO:617 shown in FIG. 617.

[0677] FIG. 619 shows a nucleotide sequence (SEQ ID NO:619) of a native sequence PRO70030 cDNA, wherein SEQ ID NO:619 is a clone designated herein as “DNA288272”.

[0678] FIG. 620 shows the amino acid sequence (SEQ ID NO:620) derived from the coding sequence of SEQ ID NO:619 shown in FIG. 619.

[0679] FIG. 621 shows a nucleotide sequence (SEQ ID NO:621) of a native sequence PRO50195 cDNA, wherein SEQ ID NO:621 is a clone designated herein as “DNA255113”.

[0680] FIG. 622 shows the amino acid sequence (SEQ ID NO:622) derived from the coding sequence of SEQ ID NO:621 shown in FIG. 621.

[0681] FIG. 623 shows a nucleotide sequence (SEQ ID NO:623) of a native sequence PRO69651 cDNA, wherein SEQ ID NO:623 is a clone designated herein as “DNA287393”.

[0682] FIG. 624 shows the amino acid sequence (SEQ ID NO:624) derived from the coding sequence of SEQ ID NO:623 shown in FIG. 623.

[0683] FIG. 625A-B shows a nucleotide sequence (SEQ ID NO:625A-B) of a native sequence PRO37538 cDNA, wherein SEQ ID NO:625A-B is a clone designated herein as “DNA227075”.

[0684] FIG. 626 shows the amino acid sequence (SEQ ID NO:626) derived from the coding sequence of SEQ ID NO:625A-B shown in FIG. 625A-B.

[0685] FIG. 627 shows a nucleotide sequence (SEQ ID NO:627) of a native sequence PRO69652 cDNA, wherein SEQ ID NO:627 is a clone designated herein as “DNA287394”.

[0686] FIG. 628 shows the amino acid sequence (SEQ ID NO:628) derived from the coding sequence of SEQ ID NO:627 shown in FIG. 627.

[0687] FIG. 629 shows a nucleotide sequence (SEQ ID NO:629) of a native sequence PRO59210 cDNA, wherein SEQ ID NO:629 is a clone designated herein as “DNA270875”.

[0688] FIG. 630 shows the amino acid sequence (SEQ ID NO:630) derived from the coding sequence of SEQ ID NO:629 shown in FIG. 629.

[0689] FIG. 631 shows a nucleotide sequence (SEQ ID NO:631) of a native sequence PRO23374 cDNA, wherein SEQ ID NO:631 is a clone designated herein as “DNA193967”.

[0690] FIG. 632 shows the amino acid sequence (SEQ ID NO:632) derived from the coding sequence of SEQ ID NO:631 shown in FIG. 631.

[0691] FIG. 633 shows a nucleotide sequence (SEQ ID NO:633) of a native sequence PRO24844 cDNA, wherein SEQ ID NO:633 is a clone designated herein as “DNA288273”.

[0692] FIG. 634 shows the amino acid sequence (SEQ ID NO:634) derived from the coding sequence of SEQ ID NO:633 shown in FIG. 633.

[0693] FIG. 635 shows a nucleotide sequence (SEQ ID NO:635) of a native sequence PRO70031 cDNA, wherein SEQ ID NO:635 is a clone designated herein as “DNA288274”.

[0694] FIG. 636 shows the amino acid sequence (SEQ ID NO:636) derived from the coding sequence of SEQ ID NO:635 shown in FIG. 635.

[0695] FIG. 637 shows a nucleotide sequence (SEQ ID NO:637) of a native sequence PRO69653 cDNA, wherein SEQ ID NO:637 is a clone designated herein as “DNA287396”.

[0696] FIG. 638 shows the amino acid sequence (SEQ ID NO:638) derived from the coding sequence of SEQ ID NO:637 shown in FIG. 637.

[0697] FIG. 639 shows a nucleotide sequence (SEQ ID NO:639) of a native sequence PRO69654 cDNA, wherein SEQ ID NO:639 is a clone designated herein as “DNA287397”.

[0698] FIG. 640 shows the amino acid sequence (SEQ ID NO:640) derived from the coding sequence of SEQ ID NO:639 shown in FIG. 639.

[0699] FIG. 641 shows a nucleotide sequence (SEQ ID NO:641) of a native sequence PRO69655 cDNA, wherein SEQ ID NO:641 is a clone designated herein as “DNA287398”.

[0700] FIG. 642 shows the amino acid sequence (SEQ ID NO:642) derived from the coding sequence of SEQ ID NO:641 shown in FIG. 641.

[0701] FIG. 643 shows a nucleotide sequence (SEQ ID NO:643) of a native sequence PRO69656 cDNA, wherein SEQ ID NO:643 is a clone designated herein as “DNA287399”.

[0702] FIG. 644 shows the amino acid sequence (SEQ ID NO:644) derived from the coding sequence of SEQ ID NO:643 shown in FIG. 643.

[0703] FIG. 645 shows a nucleotide sequence (SEQ ID NO:645) of a native sequence PRO70032 cDNA, wherein SEQ ID NO:645 is a clone designated herein as “DNA288275”.

[0704] FIG. 646 shows the amino acid sequence (SEQ ID NO:646) derived from the coding sequence of SEQ ID NO:645 shown in FIG. 645.

[0705] FIG. 647 shows a nucleotide sequence (SEQ ID NO:647) of a native sequence PRO69659 cDNA, wherein SEQ ID NO:647 is a clone designated herein as “DNA287402”.

[0706] FIG. 648 shows the amino acid sequence (SEQ ID NO:648) derived from the coding sequence of SEQ ID NO:647 shown in FIG. 647.

[0707] FIG. 649 shows a nucleotide sequence (SEQ ID NO:649) of a native sequence PRO69660 cDNA, wherein SEQ ID NO:649 is a clone designated herein as “DNA287403”.

[0708] FIG. 650 shows the amino acid sequence (SEQ ID NO:650) derived from the coding sequence of SEQ ID NO:649 shown in FIG. 649.

[0709] FIG. 651 A-B shows a nucleotide sequence (SEQ ID NO:651A-B) of a native sequence PRO58054 cDNA, wherein SEQ ID NO:651A-B is a clone designated herein as “DNA269642”.

[0710] FIG. 652 shows the amino acid sequence (SEQ ID NO:652) derived from the coding sequence of SEQ ID NO:651A-B shown in FIG. 651A-B.

[0711] FIG. 653 shows a nucleotide sequence (SEQ ID NO:653) of a native sequence PRO69661 cDNA, wherein SEQ ID NO:653 is a clone designated herein as “DNA287404”.

[0712] FIG. 654 shows the amino acid sequence (SEQ ID NO:654) derived from the coding sequence of SEQ ID NO:653 shown in FIG. 653.

[0713] FIG. 655 shows a nucleotide sequence (SEQ ID NO:655) of a native sequence PRO69662 cDNA, wherein SEQ ID NO:655 is a clone designated herein as “DNA287405”.

[0714] FIG. 656 shows the amino acid sequence (SEQ ID NO:656) derived from the coding sequence of SEQ ID NO:655 shown in FIG. 655.

[0715] FIG. 657 shows a nucleotide sequence (SEQ ID NO:657) of a native sequence PRO69898 cDNA, wherein SEQ ID NO:657 is a clone designated herein as “DNA287653”.

[0716] FIG. 658 shows the amino acid sequence (SEQ ID NO:658) derived from the coding sequence of SEQ ID NO:657 shown in FIG. 657.

[0717] FIG. 659 shows a nucleotide sequence (SEQ ID NO:659) of a native sequence PRO69664 cDNA, wherein SEQ ID NO:659 is a clone designated herein as “DNA287407”.

[0718] FIG. 660 shows the amino acid sequence (SEQ ID NO:660) derived from the coding sequence of SEQ ID NO:659 shown in FIG. 659.

[0719] FIG. 661 shows a nucleotide sequence (SEQ ID NO:661) of a native sequence PRO69665 cDNA, wherein SEQ ID NO:661 is a clone designated herein as “DNA287408”.

[0720] FIG. 662 shows the amino acid sequence (SEQ ID NO:662) derived from the coding sequence of SEQ ID NO:661 shown in FIG. 661.

[0721] FIG. 663 shows a nucleotide sequence (SEQ ID NO:663) of a native sequence PRO69666 cDNA, wherein SEQ ID NO:663 is a clone designated herein as “DNA287409”.

[0722] FIG. 664 shows the amino acid sequence (SEQ ID NO:664) derived from the coding sequence of SEQ ID NO:663 shown in FIG. 663.

[0723] FIG. 665 shows a nucleotide sequence (SEQ ID NO:665) of a native sequence PRO69667 cDNA, wherein SEQ ID NO:665 is a clone designated herein as “DNA287410”.

[0724] FIG. 666 shows the amino acid sequence (SEQ ID NO:666) derived from the coding sequence of SEQ ID NO:665 shown in FIG. 665.

[0725] FIG. 667 shows a nucleotide sequence (SEQ ID NO:667) of a native sequence PRO69669 cDNA, wherein SEQ ID NO:667 is a clone designated herein as “DNA287412”.

[0726] FIG. 668 shows the amino acid sequence (SEQ ID NO:668) derived from the coding sequence of SEQ ID NO:667 shown in FIG. 667.

[0727] FIG. 669 shows a nucleotide sequence (SEQ ID NO:669) of a native sequence PRO69671 cDNA, wherein SEQ ID NO:669 is a clone designated herein as “DNA287414”.

[0728] FIG. 670 shows the amino acid sequence (SEQ ID NO:670) derived from the coding sequence of SEQ ID NO:669 shown in FIG. 669.

[0729] FIG. 671 shows a nucleotide sequence (SEQ ID NO:671) of a native sequence PRO69672 cDNA, wherein SEQ ID NO:671 is a clone designated herein as “DNA287415”.

[0730] FIG. 672 shows the amino acid sequence (SEQ ID NO:672) derived from the coding sequence of SEQ ID NO:671 shown in FIG. 671.

[0731] FIG. 673A-B shows a nucleotide sequence (SEQ ID NO:673A-B) of a native sequence PRO58204 cDNA, wherein SEQ ID NO:673A-B is a clone designated herein as “DNA269799”.

[0732] FIG. 674 shows the amino acid sequence (SEQ ID NO:674) derived from the coding sequence of SEQ ID NO:673A-B shown in FIG. 673A-B.

[0733] FIG. 675 shows a nucleotide sequence (SEQ ID NO:675) of a native sequence PRO49419 cDNA, wherein SEQ ID NO:675 is a clone designated herein as “DNA254308”.

[0734] FIG. 676 shows the amino acid sequence (SEQ ID NO:676) derived from the coding sequence of SEQ ID NO:675 shown in FIG. 675.

[0735] FIG. 677 shows a nucleotide sequence (SEQ ID NO:677) of a native sequence PRO69673 cDNA, wherein SEQ ID NO:677 is a clone designated herein as “DNA287416”.

[0736] FIG. 678 shows the amino acid sequence (SEQ ID NO:678) derived from the coding sequence of SEQ ID NO:677 shown in FIG. 677.

[0737] FIG. 679 shows a nucleotide sequence (SEQ ID NO:679) of a native sequence PRO69674 cDNA, wherein SEQ ID NO:679 is a clone designated herein as “DNA287417”.

[0738] FIG. 680 shows the amino acid sequence (SEQ ID NO:680) derived from the coding sequence of SEQ ID NO:679 shown in FIG. 679.

[0739] FIG. 681 shows a nucleotide sequence (SEQ ID NO:681) of a native sequence PRO49810 cDNA, wherein SEQ ID NO:681 is a clone designated herein as “DNA254710”.

[0740] FIG. 682 shows the amino acid sequence (SEQ ID NO:682) derived from the coding sequence of SEQ ID NO:681 shown in FIG. 681.

[0741] FIG. 683 shows a nucleotide sequence (SEQ ID NO:683) of a native sequence PRO70033 cDNA, wherein SEQ ID NO:683 is a clone designated herein as “DNA288276”.

[0742] FIG. 684 shows the amino acid sequence (SEQ ID NO:684) derived from the coding sequence of SEQ ID NO:683 shown in FIG. 683.

[0743] FIG. 685 shows a nucleotide sequence (SEQ ID NO:685) of a native sequence PRO69676 cDNA, wherein SEQ ID NO:685 is a clone designated herein as “DNA287419”.

[0744] FIG. 686 shows the amino acid sequence (SEQ ID NO:686) derived from the coding sequence of SEQ ID NO:685 shown in FIG. 685.

[0745] FIG. 687 shows a nucleotide sequence (SEQ ID NO:687) of a native sequence PRO58076 cDNA, wherein SEQ ID NO:687 is a clone designated herein as “DNA269665”.

[0746] FIG. 688 shows the amino acid sequence (SEQ ID NO:688) derived from the coding sequence of SEQ ID NO:687 shown in FIG. 687.

[0747] FIG. 689 shows a nucleotide sequence (SEQ ID NO:689) of a native sequence PRO69677 cDNA, wherein SEQ ID NO:689 is a clone designated herein as “DNA287420”.

[0748] FIG. 690 shows the amino acid sequence (SEQ ID NO:690) derived from the coding sequence of SEQ ID NO:689 shown in FIG. 689.

[0749] FIG. 691 shows a nucleotide sequence (SEQ ID NO:691) of a native sequence PRO69678 cDNA, wherein SEQ ID NO:691 is a clone designated herein as “DNA287421 ”.

[0750] FIG. 692 shows the amino acid sequence (SEQ ID NO:692) derived from the coding sequence of SEQ ID NO:691 shown in FIG. 691.

[0751] FIG. 693 shows a nucleotide sequence (SEQ ID NO:693) of a native sequence PRO69679 cDNA, wherein SEQ ID NO:693 is a clone designated herein as “DNA287422”.

[0752] FIG. 694 shows the amino acid sequence (SEQ ID NO:694) derived from the coding sequence of SEQ ID NO:693 shown in FIG. 693.

[0753] FIG. 695 shows a nucleotide sequence (SEQ ID NO:695) of a native sequence PRO1718 cDNA, wherein SEQ ID NO:695 is a clone designated herein as “DNA82362”.

[0754] FIG. 696 shows the amino acid sequence (SEQ ID NO:696) derived from the coding sequence of SEQ ID NO:695 shown in FIG. 695.

[0755] FIG. 697 shows a nucleotide sequence (SEQ ID NO:697) of a native sequence PRO51161 cDNA, wherein SEQ ID NO:697 is a clone designated herein as “DNA256112”.

[0756] FIG. 698 shows the amino acid sequence (SEQ ID NO:698) derived from the coding sequence of SEQ ID NO:697 shown in FIG. 697.

[0757] FIG. 699 shows a nucleotide sequence (SEQ ID NO:699) of a native sequence PRO69680 cDNA, wherein SEQ ID NO:699 is a clone designated herein as “DNA287423”.

[0758] FIG. 700 shows the amino acid sequence (SEQ ID NO:700) derived from the coding sequence of SEQ ID NO:699 shown in FIG. 699.

[0759] FIG. 701 shows a nucleotide sequence (SEQ ID NO:701) of a native sequence PRO59281 cDNA, wherein SEQ ID NO:701 is a clone designated herein as “DNA270950”.

[0760] FIG. 702 shows the amino acid sequence (SEQ ID NO:702) derived from the coding sequence of SEQ ID NO:701 shown in FIG. 701.

[0761] FIG. 703 shows a nucleotide sequence (SEQ ID NO:703) of a native sequence PRO36102 cDNA, wherein SEQ ID NO:703 is a clone designated herein as “DNA225639”.

[0762] FIG. 704 shows the amino acid sequence (SEQ ID NO:704) derived from the coding sequence of SEQ ID NO:703 shown in FIG. 703.

[0763] FIG. 705 shows a nucleotide sequence (SEQ ID NO:705) of a native sequence PRO61799 cDNA, wherein SEQ ID NO:705 is a clone designated herein as “DNA273839”.

[0764] FIG. 706 shows the amino acid sequence (SEQ ID NO:706) derived from the coding sequence of SEQ ID NO:705 shown in FIG. 705.

[0765] FIG. 707 shows a nucleotide sequence (SEQ ID NO:707) of a native sequence PRO69681 cDNA, wherein SEQ ID NO:707 is a clone designated herein as “DNA287424 ”.

[0766] FIG. 708 shows the amino acid sequence (SEQ ID NO:708) derived from the coding sequence of SEQ ID NO:707 shown in FIG. 707.

[0767] FIG. 709 shows a nucleotide sequence (SEQ ID NO:709) of a native sequence PRO69682 cDNA, wherein SEQ ID NO:709 is a clone designated herein as “DNA287425”.

[0768] FIG. 710 shows the amino acid sequence (SEQ ID NO:710) derived from the coding sequence of SEQ ID NO:710 shown in FIG. 710.

[0769] FIG. 711 shows a nucleotide sequence (SEQ ID NO:711) of a native sequence PRO69901 cDNA, wherein SEQ ID NO:711 is a clone designated herein as “DNA287656”.

[0770] FIG. 712 shows the amino acid sequence (SEQ ID NO:712) derived from the coding sequence of SEQ ID NO:711 shown in FIG. 711.

[0771] FIG. 713 shows a nucleotide sequence (SEQ ID NO:713) of a native sequence PRO69684 cDNA, wherein SEQ ID NO:713 is a clone designated herein as “DNA287427”.

[0772] FIG. 714 shows the amino acid sequence (SEQ ID NO:714) derived from the coding sequence of SEQ ID NO:713 shown in FIG. 713.

[0773] FIG. 715 shows a nucleotide sequence (SEQ ID NO:715) of a native sequence PRO69685 cDNA, wherein SEQ ID NO:715 is a clone designated herein as “DNA287428”.

[0774] FIG. 716 shows the amino acid sequence (SEQ ID NO:716) derived from the coding sequence of SEQ ID NO:715 shown in FIG. 715.

[0775] FIG. 717 shows a nucleotide sequence (SEQ ID NO:717) of a native sequence PRO69686 cDNA, wherein SEQ ID NO:717 is a clone designated herein as “DNA287429”.

[0776] FIG. 718 shows the amino acid sequence (SEQ ID NO:718) derived from the coding sequence of SEQ ID NO:717 shown in FIG. 717.

[0777] FIG. 719 shows a nucleotide sequence (SEQ ID NO:719) of a native sequence PRO69687 cDNA, wherein SEQ ID NO:719 is a clone designated herein as “DNA287430”.

[0778] FIG. 720 shows the amino acid sequence (SEQ ID NO:720) derived from the coding sequence of SEQ ID NO:719 shown in FIG. 719.

[0779] FIG. 721 shows a nucleotide sequence (SEQ ID NO:721) of a native sequence PRO38469 cDNA, wherein SEQ ID NO:721 is a clone designated herein as “DNA228006”.

[0780] FIG. 722 shows the amino acid sequence (SEQ ID NO:722) derived from the coding sequence of SEQ ID NO:721 shown in FIG. 721.

[0781] FIG. 723 shows a nucleotide sequence (SEQ ID NO:723) of a native sequence PRO69688 cDNA, wherein SEQ ID NO:723 is a clone designated herein as “DNA287657”.

[0782] FIG. 724 shows the amino acid sequence (SEQ ID NO:724) derived from the coding sequence of SEQ ID NO:723 shown in FIG. 723.

[0783] FIG. 725 shows a nucleotide sequence (SEQ ID NO:725) of a native sequence PRO70034 cDNA, wherein SEQ ID NO:725 is a clone designated herein as “DNA288277”.

[0784] FIG. 726 shows the amino acid sequence (SEQ ID NO:726) derived from the coding sequence of SEQ ID NO:725 shown in FIG. 725.

[0785] FIG. 727 shows a nucleotide sequence (SEQ ID NO:727) of a native sequence PRO59354 cDNA, wherein SEQ ID NO:727 is a clone designated herein as “DNA271026”.

[0786] FIG. 728 shows the amino acid sequence (SEQ ID NO:728) derived from the coding sequence of SEQ ID NO:727 shown in FIG. 727.

[0787] FIG. 729 shows a nucleotide sequence (SEQ ID NO:729) of a native sequence PRO59189 cDNA, wherein SEQ ID NO:729 is a clone designated herein as “DNA270851”.

[0788] FIG. 730 shows the amino acid sequence (SEQ ID NO:730) derived from the coding sequence of SEQ ID NO:729 shown in FIG. 729.

[0789] FIG. 731 shows a nucleotide sequence (SEQ ID NO:731) of a native sequence PRO38197 cDNA, wherein SEQ ID NO:731 is a clone designated herein as “DNA227734”.

[0790] FIG. 732 shows the amino acid sequence (SEQ ID NO:732) derived from the coding sequence of SEQ ID NO:731 shown in FIG. 731.

[0791] FIG. 733 shows a nucleotide sequence (SEQ ID NO:733) of a native sequence PRO69902 cDNA, wherein SEQ ID NO:733 is a clone designated herein as “DNA287658”.

[0792] FIG. 734 shows the amino acid sequence (SEQ ID NO:734) derived from the coding sequence of SEQ ID NO:733 shown in FIG. 733.

[0793] FIG. 735 shows a nucleotide sequence (SEQ ID NO:735) of a native sequence PRO69690 cDNA, wherein SEQ ID NO:735 is a clone designated herein as “DNA287433”.

[0794] FIG. 736 shows the amino acid sequence (SEQ ID NO:736) derived from the coding sequence of SEQ ID NO:735 shown in FIG. 735.

[0795] FIG. 737A-B shows a nucleotide sequence (SEQ ID NO:737A-B) of a native sequence PRO61569 cDNA, wherein SEQ ID NO:737A-B is a clone designated herein as “DNA273593”.

[0796] FIG. 738 shows the amino acid sequence (SEQ ID NO:738) derived from the coding sequence of SEQ ID NO:737A-B shown in FIG. 737A-B.

[0797] FIG. 739 shows a nucleotide sequence (SEQ ID NO:739) of a native sequence PRO69903 cDNA, wherein SEQ ID NO:739 is a clone designated herein as “DNA287659”.

[0798] FIG. 740 shows the amino acid sequence (SEQ ID NO:740) derived from the coding sequence of SEQ ID NO:739 shown in FIG. 739.

[0799] FIG. 741 shows a nucleotide sequence (SEQ ID NO:741) of a native sequence PRO1970 cDNA, wherein SEQ ID NO:741 is a clone designated herein as “DNA287434”.

[0800] FIG. 742 shows the amino acid sequence (SEQ ID NO:742) derived from the coding sequence of SEQ ID NO:741 shown in FIG. 741.

### DETAILED DESCRIPTION OF THE PREFERRED EMBODIMENTS

[0801] I. Definitions

[0802] The terms “PRO polypeptide” and “PRO” as used herein and when immediately followed by a numerical designation refer to various polypeptides, wherein the complete designation (i.e., PRO/number) refers to specific polypeptide sequences as described herein. The terms “PRO/number polypeptide” and “PRO/number” wherein the term “number” is provided as an actual numerical designation as used herein encompass native sequence polypeptides and polypeptide variants (which are further defined herein). The PRO polypeptides described herein may be isolated from a variety of sources, such as from human tissue types or from another source, or prepared by recombinant or synthetic methods. The term “PRO polypeptide” refers to each individual PRO/number polypeptide disclosed herein. All disclosures in this specification which refer to the “PRO polypeptide” refer to each of the polypeptides individually as well as jointly. For example, descriptions of the preparation of, purification of, derivation of, formation of antibodies to or against, administration of, compositions containing, treatment of a disease with, etc., pertain to each polypeptide of the invention individually. The term “PRO polypeptide” also includes variants of the PRO/number polypeptides disclosed herein.

[0803] A “native sequence PRO polypeptide” comprises a polypeptide having the same amino acid sequence as the corresponding PRO polypeptide derived from nature. Such native sequence PRO polypeptides can be isolated from nature or can be produced by recombinant or synthetic means. The term “native sequence PRO polypeptide” specifically encompasses naturally-occurring truncated or secreted forms of the specific PRO polypeptide (e.g., an extracellular domain sequence), naturally-occurring variant forms (e.g., alternatively spliced forms) and naturally-occurring allelic variants of the polypeptide. In various embodiments of the invention, the native sequence PRO polypeptides disclosed herein are mature or full-length native sequence polypeptides comprising the full-length amino acids sequences shown in the accompanying figures. Start and stop codons are shown in bold font and underlined in the figures. However, while the PRO polypeptide disclosed in the accompanying figures are shown to begin with methionine residues designated herein as amino acid position I in the figures, it is conceivable and possible that other methionine residues located either upstream or downstream from the amino acid position I in the figures may be employed as the starting amino acid residue for the PRO polypeptides.

[0804] The PRO polypeptide “extracellular domain” or “ECD” refers to a form of the PRO polypeptide which is essentially free of the transmembrane and cytoplasmic domains. Ordinarily, a PRO polypeptide ECD will have less than 1% of such transmembrane and/or cytoplasmic domains and preferably, will have less than 0.5% of such domains. It will be understood that any transmembrane domains identified for the PRO polypeptides of the present invention are identified pursuant to criteria routinely employed in the art for identifying that type of hydrophobic domain. The exact boundaries of a transmembrane domain may vary but most likely by no more than about 5 amino acids at either end of the domain as initially identified herein. Optionally, therefore, an extracellular domain of a PRO polypeptide may contain from about 5 or fewer amino acids on either side of the transmembrane domain/extracellular domain boundary as identified in the Examples or specification and such polypeptides, with or without the associated signal peptide, and nucleic acid encoding them, are contemplated by the present invention.

[0805] The approximate location of the “signal peptides” of the various PRO polypeptides disclosed herein are shown in the present specification and/or the accompanying figures. It is noted, however, that the C-terminal boundary of a signal peptide may vary, but most likely by no more than about 5 amino acids on either side of the signal peptide C-terminal boundary as initially identified herein, wherein the C-terminal boundary of the signal peptide may be identified pursuant to criteria routinely employed in the art for identifying that type of amino acid sequence element (e.g., Nielsen et al., Prot. Eng. 10:1-6(1997) and von Heinje et al., Nucl. Acids. Res. 14:4683-4690 (1986)). Moreover, it is also recognized that, in some cases, cleavage of a signal sequence from a secreted polypeptide is not entirely uniform, resulting in more than one secreted species. These mature polypeptides, where the signal peptide is cleaved within no more than about 5 amino acids on either side of the C-terminal boundary of the signal peptide as identified herein, and the polynucleotides encoding them, are contemplated by the present invention.

[0806] “PRO polypeptide variant” means an active PRO polypeptide as defined above or below having at least about 80% amino acid sequence identity with a full-length native sequence PRO polypeptide sequence as disclosed herein, a PRO polypeptide sequence lacking the signal peptide as disclosed herein, an extracellular domain of a PRO polypeptide, with or without the signal peptide, as disclosed herein or any other fragment of a full-length PRO polypeptide sequence as disclosed herein. Such PRO polypeptide variants include, for instance, PRO polypeptides wherein one or more amino acid residues are added, or deleted, at the N- or C-terminus of the full-length native amino acid sequence. Ordinarily, a PRO polypeptide variant will have at least about 80% amino acid sequence identity, alternatively at least about 81% amino acid sequence identity, alternatively at least about 82% amino acid sequence identity, alternatively at least about 83% amino acid sequence identity, alternatively at least about 84% amino acid sequence identity, alternatively at least about 85% amino acid sequence identity, alternatively at least about 86% amino acid sequence identity, alternatively at least about 87% amino acid sequence identity, alternatively at least about 88% amino acid sequence identity, alternatively at least about 89% amino acid sequence identity, alternatively at least about 90% amino acid sequence identity, alternatively at least about 91% amino acid sequence identity, alternatively at least about 92% amino acid sequence identity, alternatively at least about 93% amino acid sequence identity, alternatively at least about 94% amino acid sequence identity, alternatively at least about 95% amino acid sequence identity, alternatively at least about 96% amino acid sequence identity, alternatively at least about 97% amino acid sequence identity, alternatively at least about 98% amino acid sequence identity and alternatively at least about 99% amino acid sequence identity to a full-length native sequence PRO polypeptide sequence as disclosed herein, a PRO polypeptide sequence lacking the signal peptide as disclosed herein, an extracellular domain of a PRO polypeptide, with or without the signal peptide, as disclosed herein or any other specifically defined fragment of a full-length PRO polypeptide sequence as disclosed herein. Ordinarily, PRO variant polypeptides are at least about 10 amino acids in length, alternatively at least about 20 amino acids in length, alternatively at least about 30 amino acids in length, alternatively at least about 40 amino acids in length, alternatively at least about 50 amino acids in length, alternatively at least about 60 amino acids in length, alternatively at least about 70 amino acids in length, alternatively at least about 80 amino acids in length, alternatively at least about 90 amino acids in length, alternatively at least about 100 amino acids in length, alternatively at least about 150 amino acids in length, alternatively at least about 200 amino acids in length, alternatively at least about 300 amino acids in length, or more.

[0807] “Percent (%) amino acid sequence identity” with respect to the PRO polypeptide sequences identified herein is defined as the percentage of amino acid residues in a candidate sequence that are identical with the amino acid residues in the specific PRO polypeptide sequence, after aligning the sequences and introducing gaps, if necessary, to achieve the maximum percent sequence identity, and not considering any conservative substitutions as part of the sequence identity. Alignment for purposes of determining percent amino acid sequence identity can be achieved in various ways that are within the skill in the art, for instance, using publicly available computer software such as BLAST, BLAST-2, ALIGN or Megalign (DNASTAR) software. Those skilled in the art can determine appropriate parameters for measuring alignment, including any algorithms needed to achieve maximal alignment over the full length of the sequences being compared. For purposes herein, however, % amino acid sequence identity values are generated using the sequence comparison computer program ALIGN-2, wherein the complete source code for the ALIGN-2 program is provided in Table I below. The ALIGN-2 sequence comparison computer program was authored by Genentech, Inc. and the source code shown in Table 1 below has been filed with user documentation in the U.S. Copyright Office, Washington D.C., 20559, where it is registered under U.S. Copyright Registration No. TXU510087. The ALIGN-2 program is publicly available through Genentech, Inc., South San Francisco, Calif. or may be compiled from the source code provided in Table 1 below. The ALIGN-2 program should be compiled for use on a UNIX operating system, preferably digital UNIX V4.0D. All sequence comparison parameters are set by the ALIGN-2 program and do not vary.

[0808] In situations where ALIGN-2 is employed for amino acid sequence comparisons, the % amino acid sequence identity of a given amino acid sequence A to, with, or against a given amino acid sequence B (which can alternatively be phrased as a given amino acid sequence A that has or comprises a certain % amino acid sequence identity to, with, or against a given amino acid sequence B) is calculated as follows:

[0809] 100 times the fraction X/Y

[0810] where X is the number of amino acid residues scored as identical matches by the sequence alignment program ALIGN-2 in that program's alignment of A and B, and where Y is the total number of amino acid residues in B. It will be appreciated that where the length of amino acid sequence A is not equal to the length of amino acid sequence B, the % amino acid sequence identity of A to B will not equal the % amino acid sequence identity of B to A. As examples of % amino acid sequence identity calculations using this method, Tables 2 and 3 demonstrate how to calculate the % amino acid sequence identity of the amino acid sequence designated “Comparison Protein” to the amino acid sequence designated “PRO”, wherein “PRO” represents the amino acid sequence of a hypothetical PRO polypeptide of interest, “Comparison Protein” represents the amino acid sequence of a polypeptide against which the “PRO” polypeptide of interest is being compared, and “X, “Y” and “Z” each represent different hypothetical amino acid residues.

[0811] Unless specifically stated otherwise, all % amino acid sequence identity values used herein are obtained as described in the immediately preceding paragraph using the ALIGN-2 computer program. However, % amino acid sequence identity values may also be obtained as described below by using the WU-BLAST-2 computer program (Altschul et al., Methods in Enzymology 266:460-480 (1996)). Most of the WU-BLAST-2 search parameters are set to the default values. Those not set to default values, i.e., the adjustable parameters, are set with the following values: overlap span=1, overlap fraction=0.125, word threshold (T)=11, and scoring matrix=BLOSUM62. When WU-BLAST-2 is employed, a % amino acid sequence identity value is determined by dividing (a) the number of matching identical amino acid residues between the amino acid sequence of the PRO polypeptide of interest having a sequence derived from the native PRO polypeptide and the comparison amino acid sequence of interest (i.e., the sequence against which the PRO polypeptide of interest is being compared which may be a PRO variant polypeptide) as determined by WU-BLAST-2 by (b) the total number of amino acid residues of the PRO polypeptide of interest. For example, in the statement “a polypeptide comprising an the amino acid sequence A which has or having at least 80% amino acid sequence identity to the amino acid sequence B”, the amino acid sequence A is the comparison amino acid sequence of interest and the amino acid sequence B is the amino acid sequence of the PRO polypeptide of interest.

[0812] Percent amino acid sequence identity may also be determined using the sequence comparison program NCBI-BLAST2 (Altschul et al., Nucleic Acids Res. 25:3389-3402 (1997)). The NCBI-BLAST2 sequence comparison program may be downloaded from http://www.ncbi.nlm.nih.gov or otherwise obtained from the National Institute of Health, Bethesda, Md. NCBI-BLAST2 uses several search parameters, wherein all of those search parameters are set to default values including, for example, unmask=yes, strand=all, expected occurrences=10, minimum low complexity length=15/5, multi-pass e-value=0.01, constant for multi-pass=25, dropoff for final gapped alignment=25 and scoring matrix=BLOSUM62.

[0813] In situations where NCBI-BLAST2 is employed for amino acid sequence comparisons, the % amino acid sequence identity of a given amino acid sequence A to, with, or against a given amino acid sequence B (which can alternatively be phrased as a given amino acid sequence A that has or comprises a certain % amino acid sequence identity to, with, or against a given amino acid sequence B) is calculated as follows:

[0814] 100 times the fraction X/Y

[0815] where X is the number of amino acid residues scored as identical matches by the sequence alignment program NCBI-BLAST2 in that program's alignment of A and B, and where Y is the total number of amino acid residues in B. It will be appreciated that where the length of amino acid sequence A is not equal to the length of amino acid sequence B, the % amino acid sequence identity of A to B will not equal the % amino acid sequence identity of B to A.

[0816] “PRO variant polynucleotide” or “PRO variant nucleic acid sequence” means a nucleic acid molecule which encodes an active PRO polypeptide as defined below and which has at least about 80% nucleic acid sequence identity with a nucleotide acid sequence encoding a full-length native sequence PRO polypeptide sequence as disclosed herein, a full-length native sequence PRO polypeptide sequence lacking the signal peptide as disclosed herein, an extracellular domain of a PRO polypeptide, with or without the signal peptide, as disclosed herein or any other fragment of a full-length PRO polypeptide sequence as disclosed herein. Ordinarily, a PRO variant polynucleotide will have at least about 80% nucleic acid sequence identity, alternatively at least about 81% nucleic acid sequence identity, alternatively at least about 82% nucleic acid sequence identity, alternatively at least about 83% nucleic acid sequence identity, alternatively at least about 84% nucleic acid sequence identity, alternatively at least about 85% nucleic acid sequence identity, alternatively at least about 86% nucleic acid sequence identity, alternatively at least about 87% nucleic acid sequence identity, alternatively at least about 88% nucleic acid sequence identity, alternatively at least about 89% nucleic acid sequence identity, alternatively at least about 90% nucleic acid sequence identity, alternatively at least about 91% nucleic acid sequence identity, alternatively at least about 92% nucleic acid sequence identity, alternatively at least about 93% nucleic acid sequence identity, alternatively at least about 94% nucleic acid sequence identity, alternatively at least about 95% nucleic acid sequence identity, alternatively at least about 96% nucleic acid sequence identity, alternatively at least about 97% nucleic acid sequence identity, alternatively at least about 98% nucleic acid sequence identity and alternatively at least about 99% nucleic acid sequence identity with a nucleic acid sequence encoding a full-length native sequence PRO polypeptide sequence as disclosed herein, a full-length native sequence PRO polypeptide sequence lacking the signal peptide as disclosed herein, an extracellular domain of a PRO polypeptide, with or without the signal sequence, as disclosed herein or any other fragment of a full-length PRO polypeptide sequence as disclosed herein. Variants do not encompass the native nucleotide sequence.

[0817] Ordinarily, PRO variant polynucleotides are at least about 30 nucleotides in length, alternatively at least about 60 nucleotides in length, alternatively at least about 90 nucleotides in length, alternatively at least about 120 nucleotides in length, alternatively at least about 150 nucleotides in length, alternatively at least about 180 nucleotides in length, alternatively at least about 210 nucleotides in length, alternatively at least about 240 nucleotides in length, alternatively at least about 270 nucleotides in length, alternatively at least about 300 nucleotides in length, alternatively at least about 450 nucleotides in length, alternatively at least about 600 nucleotides in length, alternatively at least about 900 nucleotides in length, or more.

[0818] “Percent (%) nucleic acid sequence identity” with respect to PRO-encoding nucleic acid sequences identified herein is defined as the percentage of nucleotides in a candidate sequence that are identical with the nucleotides in the PRO nucleic acid sequence of interest, after aligning the sequences and introducing gaps, if necessary, to achieve the maximum percent sequence identity. Alignment for purposes of determining percent nucleic acid sequence identity can be achieved in various ways that are within the skill in the art, for instance, using publicly available computer software such as BLAST, BLAST-2, ALIGN or Megalign (DNASTAR) software. For purposes herein, however, % nucleic acid sequence identity values are generated using the sequence comparison computer program ALIGN-2, wherein the complete source code for the ALIGN-2 program is provided in Table 1 below. The ALIGN-2 sequence comparison computer program was authored by Genentech, Inc. and the source code shown in Table I below has been filed with user documentation in the U.S. Copyright Office, Washington D.C., 20559, where it is registered under U.S. Copyright Registration No. TXU510087. The ALIGN-2 program is publicly available through Genentech, Inc., South San Francisco, Calif. or may be compiled from the source code provided in Table 1 below. The ALIGN-2 program should be compiled for use on a UNIX operating system, preferably digital UNIX V4.0D. All sequence comparison parameters are set by the ALIGN-2 program and do not vary.

[0819] In situations where ALIGN-2 is employed for nucleic acid sequence comparisons, the % nucleic acid sequence identity of a given nucleic acid sequence C to, with, or against a given nucleic acid sequence D (which can alternatively be phrased as a given nucleic acid sequence C that has or comprises a certain % nucleic acid sequence identity to, with, or against a given nucleic acid sequence D) is calculated as follows:

[0820] 100 times the fraction W/Z

[0821] where W is the number of nucleotides scored as identical matches by the sequence alignment program ALIGN-2 in that program's alignment of C and D, and where Z is the total number of nucleotides in D. It will be appreciated that where the length of nucleic acid sequence C is not equal to the length of nucleic acid sequence D, the % nucleic acid sequence identity of C to D will not equal the % nucleic acid sequence identity of D to C. As examples of % nucleic acid sequence identity calculations, Tables 4 and 5, demonstrate how to calculate the % nucleic acid sequence identity of the nucleic acid sequence designated “Comparison DNA” to the nucleic acid sequence designated “PRO-DNA”, wherein “PRO-DNA” represents a hypothetical PRO-encoding nucleic acid sequence of interest, “Comparison DNA” represents the nucleotide sequence of a nucleic acid molecule against which the “PRO-DNA” nucleic acid molecule of interest is being compared, and “N”, “L” and “V” each represent different hypothetical nucleotides.

[0822] Unless specifically stated otherwise, all % nucleic acid sequence identity values used herein are obtained as described in the immediately preceding paragraph using the ALIGN-2 computer program. However, % nucleic acid sequence identity values may also be obtained as described below by using the WU-BLAST-2 computer program (Altschul et al., Methods in Enzymology 266:460-480 (1996)). Most of the WU-BLAST-2 search parameters are set to the default values. Those not set to default values, i.e., the adjustable parameters, are set with the following values: overlap span=1, overlap fraction=0.125, word threshold (T)=11, and scoring matrix=BLOSUM62. When WU-BLAST-2 is employed, a % nucleic acid sequence identity value is determined by dividing (a) the number of matching identical nucleotides between the nucleic acid sequence of the PRO polypeptide-encoding nucleic acid molecule of interest having a sequence derived from the native sequence PRO polypeptide-encoding nucleic acid and the comparison nucleic acid molecule of interest (i.e., the sequence against which the PRO polypeptide-encoding nucleic acid molecule of interest is being compared which may be a variant PRO polynucleotide) as determined by WU-BLAST-2 by (b) the total number of nucleotides of the PRO polypeptide-encoding nucleic acid molecule of interest. For example, in the statement “an isolated nucleic acid molecule comprising a nucleic acid sequence A which has or having at least 80% nucleic acid sequence identity to the nucleic acid sequence B”, the nucleic acid sequence A is the comparison nucleic acid molecule of interest and the nucleic acid sequence B is the nucleic acid sequence of the PRO polypeptide-encoding nucleic acid molecule of interest.

[0823] Percent nucleic acid sequence identity may also be determined using the sequence comparison program NCBI-BLAST2 (Altschul et al., Nucleic Acids Res. 25:3389-3402 (1997)). The NCBI-BLAST2 sequence comparison program may be downloaded from http://www.ncbi.nim.nih.gov or otherwise obtained from the National Institute of Health, Bethesda, Md. NCBI-BLAST2 uses several search parameters, wherein all of those search parameters are set to default values including, for example, unmask=yes, strand=all, expected occurrences=10, minimum low complexity length=15/5, multi-pass e-value=0.01, constant for multi-pass=25, dropoff for final gapped alignment=25 and scoring matrix=BLOSUM62.

[0824] In situations where NCBI-BLAST2 is employed for sequence comparisons, the % nucleic acid sequence identity of a given nucleic acid sequence C to, with, or against a given nucleic acid sequence D (which can alternatively be phrased as a given nucleic acid sequence C that has or comprises a certain % nucleic acid sequence identity to, with, or against a given nucleic acid sequence D) is calculated as follows:

[0825] 100 times the fraction W/Z

[0826] where W is the number of nucleotides scored as identical matches by the sequence alignment program NCBI-BLAST2 in that program's alignment of C and D, and where Z is the total number of nucleotides in D. It will be appreciated that where the length of nucleic acid sequence C is not equal to the length of nucleic acid sequence D, the % nucleic acid sequence identity of C to D will not equal the % nucleic acid sequence identity of D to C.

[0827] In other embodiments, PRO variant polynucleotides are nucleic acid molecules that encode an active PRO polypeptide and which are capable of hybridizing, preferably under stringent hybridization and wash conditions, to nucleotide sequences encoding a full-length PRO polypeptide as disclosed herein. PRO variant polypeptides may be those that are encoded by a PRO variant polynucleotide.

[0828] “Isolated,” when used to describe the various polypeptides disclosed herein, means polypeptide that has been identified and separated and/or recovered from a component of its natural environment. Contaminant components of its natural environment are materials that would typically interfere with diagnostic or therapeutic uses for the polypeptide, and may include enzymes, hormones, and other proteinaceous or non-proteinaceous solutes. In preferred embodiments, the polypeptide will be purified (1) to a degree sufficient to obtain at least 15 residues of N-terminal or internal amino acid sequence by use of a spinning cup sequenator, or (2) to homogeneity by SDS-PAGE under non-reducing or reducing conditions using Coomassie blue or, preferably, silver stain. Isolated polypeptide includes polypeptide in situ within recombinant cells, since at least one component of the PRO polypeptide natural environment will not be present. Ordinarily, however, isolated polypeptide will be prepared by at least one purification step.

[0829] An “isolated” PRO polypeptide-encoding nucleic acid or other polypeptide-encoding nucleic acid is a nucleic acid molecule that is identified and separated from at least one contaminant nucleic acid molecule with which it is ordinarily associated in the natural source of the polypeptide-encoding nucleic acid. An isolated polypeptide-encoding nucleic acid molecule is other than in the form or setting in which it is found in nature. Isolated polypeptide-encoding nucleic acid molecules therefore are distinguished from the specific polypeptide-encoding nucleic acid molecule as it exists in natural cells. However, an isolated polypeptide-encoding nucleic acid molecule includes polypeptide-encoding nucleic acid molecules contained in cells that ordinarily express the polypeptide where, for example, the nucleic acid molecule is in a chromosomal location different from that of natural cells.

[0830] The term “control sequences” refers to DNA sequences necessary for the expression of an operably linked coding sequence in a particular host organism. The control sequences that are suitable for prokaryotes, for example, include a promoter, optionally an operator sequence, and a ribosome binding site. Eukaryotic cells are known to utilize promoters, polyadenylation signals, and enhancers.

[0831] Nucleic acid is “operably linked” when it is placed into a functional relationship with another nucleic acid sequence. For example, DNA for a presequence or secretory leader is operably linked to DNA for a polypeptide if it is expressed as a preprotein that participates in the secretion of the polypeptide; a promoter or enhancer is operably linked to a coding sequence if it affects the transcription of the sequence; or a ribosome binding site is operably linked to a coding sequence if it is positioned so as to facilitate translation. Generally, “operably linked” means that the DNA sequences being linked are contiguous, and, in the case of a secretory leader, contiguous and in reading phase. However, enhancers do not have to be contiguous. Linking is accomplished by ligation at convenient restriction sites. If such sites do not exist, the synthetic oligonucleotide adaptors or linkers are used in accordance with conventional practice.

[0832] The term “antibody” is used in the broadest sense and specifically covers, for example, single anti-PRO monoclonal antibodies (including agonist, antagonist, and neutralizing antibodies), anti-PRO antibody compositions with polyepitopic specificity, single chain anti-PRO antibodies, and fragments of anti-PRO antibodies (see below). The term “monoclonal antibody” as used herein refers to an antibody obtained from a population of substantially homogeneous antibodies, i.e., the individual antibodies comprising the population are identical except for possible naturally-occurring mutations that may be present in minor amounts.

[0833] “Stringency” of hybridization reactions is readily determinable by one of ordinary skill in the art, and generally is an empirical calculation dependent upon probe length, washing temperature, and salt concentration. In general, longer probes require higher temperatures for proper annealing, while shorter probes need lower temperatures. Hybridization generally depends on the ability of denatured DNA to reanneal when complementary strands are present in an environment below their melting temperature. The higher the degree of desired homology between the probe and hybridizable sequence, the higher the relative temperature which can be used. As a result, it follows that higher relative temperatures would tend to make the reaction conditions more stringent, while lower temperatures less so. For additional details and explanation of stringency of hybridization reactions, see Ausubel et al., Current Protocols in Molecular Biology, Wiley Interscience Publishers, (1995).

[0834] “Stringent conditions” or “high stringency conditions”, as defined herein, may be identified by those that: (1) employ low ionic strength and high temperature for washing, for example 0.015 M sodium chloride/0.0015 M sodium citrate/0.l % sodium dodecyl sulfate at 50° C.; (2) employ during hybridization a denaturing agent, such as formamide, for example, 50% (v/v) formamide with 0.1% bovine serum albumin/0.1% Ficoll/0.1% polyvinylpyrrolidone/50 mM sodium phosphate buffer at pH 6.5 with 750 mM sodium chloride, 75 mM sodium citrate at 42° C.; or (3) employ 50% formamide, 5×SSC (0.75 M NaCl, 0.075 M sodium citrate), 50 mM sodium phosphate (pH 6.8), 0.1% sodium pyrophosphate, 5× Denhardt's solution, sonicated salmon sperm DNA (50 μg/ml), 0.1% SDS, and 10% dextran sulfate at 42° C., with washes at 42° C. in 0.2×SSC (sodium chloride/sodium citrate) and 50% formamide at 55° C., followed by a high-stringency wash consisting of 0.1×SSC containing EDTA at 55° C.

[0835] “Moderately stringent conditions” may be identified as described by Sambrook et al., Molecular Cloning: A Laboratory Manual, New York: Cold Spring Harbor Press, 1989, and include the use of washing solution and hybridization conditions (e.g., temperature, ionic strength and %SDS) less stringent that those described above. An example of moderately stringent conditions is overnight incubation at 37° C. in a solution comprising: 20% formamide, 5×SSC (150 mM NaCl, 15 mM trisodium citrate), 50 mM sodium phosphate (pH 7.6), 5 × Denhardt's solution, 10% dextran sulfate, and 20 mg/ml denatured sheared salmon sperm DNA, followed by washing the filters in 1×SSC at about 37-50° C. The skilled artisan will recognize how to adjust the temperature, ionic strength, etc. as necessary to accommodate factors such as probe length and the like.

[0836] The term “epitope tagged” when used herein refers to a chimeric polypeptide comprising a PRO polypeptide fused to a “tag polypeptide”. The tag polypeptide has enough residues to provide an epitope against which an antibody can be made, yet is short enough such that it does not interfere with activity of the polypeptide to which it is fused. The tag polypeptide preferably also is fairly unique so that the antibody does not substantially cross-react with other epitopes. Suitable tag polypeptides generally have at least six amino acid residues and usually between about 8 and 50 amino acid residues (preferably, between about 10 and 20 amino acid residues).

[0837] As used herein, the term “immunoadhesin” designates antibody-like molecules which combine the binding specificity of a heterologous protein (an “adhesin”) with the effector functions of immunoglobulin constant domains. Structurally, the immunoadhesins comprise a fusion of an amino acid sequence with the desired binding specificity which is other than the antigen recognition and binding site of an antibody (i.e., is “heterologous”), and an immunoglobulin constant domain sequence. The adhesin part of an immunoadhesin molecule typically is a contiguous amino acid sequence comprising at least the binding site of a receptor or a ligand. The immunoglobulin constant domain sequence in the immunoadhesin may be obtained from any immunoglobulin, such as IgG-1, IgG-2, IgG-3, or IgG-4 subtypes, IgA (including IgA-1 and IgA-2), IgE, IgD or IgM.

[0838] “Active” or “activity” for the purposes herein refers to form(s) of a PRO polypeptide which retain a biological and/or an immunological activity of native or naturally-occurring PRO, wherein “biological” activity refers to a biological function (either inhibitory or stimulatory) caused by a native or naturally-occurring PRO other than the ability to induce the production of an antibody against an antigenic epitope possessed by a native or naturally-occurring PRO and an “immunological” activity refers to the ability to induce the production of an antibody against an antigenic epitope possessed by a native or naturally-occurring PRO.

[0839] The term “antagonist” is used in the broadest sense, and includes any molecule that partially or fully blocks, inhibits, or neutralizes a biological activity of a native PRO polypeptide disclosed herein. In a similar manner, the term “agonist” is used in the broadest sense and includes any molecule that mimics a biological activity of a native PRO polypeptide disclosed herein. Suitable agonist or antagonist molecules specifically include agonist or antagonist antibodies or antibody fragments, fragments or amino acid sequence variants of native PRO polypeptides, peptides, antisense oligonucleotides, small organic molecules, etc. Methods for identifying agonists or antagonists of a PRO polypeptide may comprise contacting a PRO polypeptide with a candidate agonist or antagonist molecule and measuring a detectable change in one or more biological activities normally associated with the PRO polypeptide.

[0840] “Treatment” refers to both therapeutic treatment and prophylactic or preventative measures, wherein the object is to prevent or slow down (lessen) the targeted pathologic condition or disorder. Those in need of treatment include those already with the disorder as well as those prone to have the disorder or those in whom the disorder is to be prevented.

[0841] “Chronic” administration refers to administration of the agent(s) in a continuous mode as opposed to an acute mode, so as to maintain the initial therapeutic effect (activity) for an extended period of time. “Intermittent” administration is treatment that is not consecutively done without interruption, but rather is cyclic in nature.

[0842] “Mammal” for purposes of treatment refers to any animal classified as a mammal, including humans, domestic and farm animals, and zoo, sports, or pet animals, such as dogs, cats, cattle, horses, sheep, pigs, goats, rabbits, etc. Preferably, the mammal is human.

[0843] Administration “in combination with” one or more further therapeutic agents includes simultaneous (concurrent) and consecutive administration in any order.

[0844] “Carriers” as used herein include pharmaceutically acceptable carriers, excipients, or stabilizers which are nontoxic to the cell or mammal being exposed thereto at the dosages and concentrations employed. Often the physiologically acceptable carrier is an aqueous pH buffered solution. Examples of physiologically acceptable carriers include buffers such as phosphate, citrate, and other organic acids; antioxidants including ascorbic acid; low molecular weight (less than about 10 residues) polypeptide; proteins, such as serum albumin, gelatin, or immunoglobulins; hydrophilic polymers such as polyvinylpyrrolidone; amino acids such as glycine, glutamine, asparagine, arginine or lysine; monosaccharides, disaccharides, and other carbohydrates including glucose, mannose, or dextrins; chelating agents such as EDTA; sugar alcohols such as mannitol or sorbitol; salt-forming counterions such as sodium; and/or nonionic surfactants such as TWEEN™, polyethylene glycol (PEG), and PLURONICS™.

[0845] “Antibody fragments” comprise a portion of an intact antibody, preferably the antigen binding or variable region of the intact antibody. Examples of antibody fragments include Fab, Fab′, F(ab′)₂, and Fv fragments; diabodies; linear antibodies (Zapata et al., Protein Eng. 8(10): 1057-1062 [1995]); single-chain antibody molecules; and multispecific antibodies formed from antibody fragments.

[0846] Papain digestion of antibodies produces two identical antigen-binding fragments, called “Fab” fragments, each with a single antigen-binding site, and a residual “Fc” fragment, a designation reflecting the ability to crystallize readily. Pepsin treatment yields an F(ab′)₂ fragment that has two antigen-combining sites and is still capable of cross-linking antigen.

[0847] “Fv” is the minimum antibody fragment which contains a complete antigen-recognition and—binding site. This region consists of a dimer of one heavy—and one light-chain variable domain in tight, non-covalent association. It is in this configuration that the three CDRs of each variable domain interact to define an antigen-binding site on the surface of the V_{H}-V_{L} dimer. Collectively, the six CDRs confer antigen-binding specificity to the antibody. However, even a single variable domain (or half of an Fv comprising only three CDRs specific for an antigen) has the ability to recognize and bind antigen, although at a lower affinity than the entire binding site.

[0848] The Fab fragment also contains the constant domain of the light chain and the first constant domain (CH1) of the heavy chain. Fab fragments differ from Fab′ fragments by the addition of a few residues at the carboxy terminus of the heavy chain CH1 domain including one or more cysteines from the antibody hinge region. Fab′-SH is the designation herein for Fab′ in which the cysteine residue(s) of the constant domains bear a free thiol group. F(ab′)₂ antibody fragments originally were produced as pairs of Fab′ fragments which have hinge cysteines between them. Other chemical couplings of antibody fragments are also known.

[0849] The “light chains” of antibodies (immunoglobulins) from any vertebrate species can be assigned to one of two clearly distinct types, called kappa and lambda, based on the amino acid sequences of their constant domains.

[0850] Depending on the amino acid sequence of the constant domain of their heavy chains, immunoglobulins can be assigned to different classes. There are five major classes of immunoglobulins. IgA, IgD, IgE, IgG, and IgM, and several of these may be further divided into subclasses (isotypes), e.g., IgG1, IgG2, IgG3, IgG4, IgA, and IgA2.

[0851] “Single-chain Fv” or “sFv” antibody fragments comprise the V_{H} and V_{L} domains of antibody, wherein these domains are present in a single polypeptide chain. Preferably, the Fv polypeptide further comprises a polypeptide linker between the V_{H} and V_{L} domains which enables the sFv to form the desired structure for antigen binding. For a review of sFv, see Pluckthun in The Pharmacology of Monoclonal Antibodies, vol. 113, Rosenburg and Moore eds., Springer-Verlag, New York, pp. 269-315 (1994).

[0852] The term “diabodies” refers to small antibody fragments with two antigen-binding sites, which fragments comprise a heavy-chain variable domain (V_{H}) connected to a light-chain variable domain (V_{L}) in the same polypeptide chain (V_{H}-V_{L}). By using a linker that is too short to allow pairing between the two domains on the same chain, the domains are forced to pair with the complementary domains of another chain and create two antigen-binding sites. Diabodies are described more fully in, for example, EP 404,097; WO 93/11161; and Hollinger et al., Proc. Natl. Acad. Sci. USA, 90:6444-6448 (1993).

[0853] An “isolated” antibody is one which has been identified and separated and/or recovered from a component of its natural environment. Contaminant components of its natural environment are materials which would interfere with diagnostic or therapeutic uses for the antibody, and may include enzymes, hormones, and other proteinaceous or nonproteinaceous solutes. In preferred embodiments, the antibody will be purified (1) to greater than 95% by weight of antibody as determined by the Lowry method, and most preferably more than 99% by weight, (2) to a degree sufficient to obtain at least 15 residues of N-terminal or internal amino acid sequence by use of a spinning cup sequenator, or (3) to homogeneity by SDS-PAGE under reducing or nonreducing conditions using Coomassie blue or, preferably, silver stain. Isolated antibody includes the antibody in situ within recombinant cells since at least one component of the antibody's natural environment will not be present. Ordinarily, however, isolated antibody will be prepared by at least one purification step.

[0854] An antibody that “specifically binds to” or is “specific for” a particular polypeptide or an epitope on a particular polypeptide is one that binds to that particular polypeptide or epitope on a particular polypeptide without substantially binding to any other polypeptide or polypeptide epitope.

[0855] The word “label” when used herein refers to a detectable compound or composition which is conjugated directly or indirectly to the antibody so as to generate a “labeled” antibody. The label may be detectable by itself (e.g. radioisotope labels or fluorescent labels) or, in the case of an enzymatic label, may catalyze chemical alteration of a substrate compound or composition which is detectable.

[0856] By “solid phase” is meant a non-aqueous matrix to which the antibody of the present invention can adhere. Examples of solid phases encompassed herein include those formed partially or entirely of glass (e.g., controlled pore glass), polysaccharides (e.g., agarose), polyacrylamides, polystyrene, polyvinyl alcohol and silicones. In certain embodiments, depending on the context, the solid phase can comprise the well of an assay plate; in others it is a purification column (e.g., an affinity chromatography column). This term also includes a discontinuous solid phase of discrete particles, such as those described in U.S. Pat. No. 4,275,149.

[0857] A “liposome” is a small vesicle composed of various types of lipids, phospholipids and/or surfactant which is useful for delivery of a drug (such as a PRO polypeptide or antibody thereto) to a mammal. The components of the liposome are commonly arranged in a bilayer formation, similar to the lipid arrangement of biological membranes.

[0858] A “small molecule” is defined herein to have a molecular weight below about 500 Daltons.

[0859] The term “immune related disease” means a disease in which a component of the immune system of a mammal causes, mediates or otherwise contributes to a morbidity in the mammal. Also included are diseases in which stimulation or intervention of the immune response has an ameliorative effect on progression of the disease. Included within this term are immune-mediated inflammatory diseases, non-immune-mediated inflammatory diseases, infectious diseases, immunodeficiency diseases, neoplasia, etc.

[0860] The term “T cell mediated disease” means a disease in which T cells directly or indirectly mediate or otherwise contribute to a morbidity in a mammal. The T cell mediated disease may be associated with cell mediated effects, lymphokine mediated effects, etc., and even effects associated with B cells if the B cells are stimulated, for example, by the lymphokines secreted by T cells.

[0861] Examples of immune-related and inflammatory diseases, some of which are immune or T cell mediated, which can be treated according to the invention include systemic lupus erythematosis, rheumatoid arthritis, juvenile chronic arthritis, spondyloarthropathies, systemic sclerosis (scleroderma), idiopathic inflammatory myopathies (dermatomyositis, polymyositis), Sjögren's syndrome, systemic vasculitis, sarcoidosis, autoimmune hemolytic anemia (immune pancytopenia, paroxysmal nocturnal hemoglobinuria), autoimmune thrombocytopenia (idiopathic thrombocytopenic purpura, immune-mediated thrombocytopenia), thyroiditis (Grave's disease, Hashimoto's thyroiditis, juvenile lymphocytic thyroiditis, atrophic thyroiditis), diabetes mellitus, immune-mediated renal disease (glomerulonephritis, tubulointerstitial nephritis), demyelinating diseases of the central and peripheral nervous systems such as multiple sclerosis, idiopathic demyelinating polyneuropathy or Guillain-Barré syndrome, and chronic inflammatory demyelinating polyneuropathy, hepatobiliary diseases such as infectious hepatitis (hepatitis A, B, C, D, E and other non-hepatotropic viruses), autoimmune chronic active hepatitis, primary biliary cirrhosis, granulomatous hepatitis, and sclerosing cholangitis, inflammatory bowel disease (ulcerative colitis: Crohn's disease), gluten-sensitive enteropathy, and Whipple's disease, autoimmune or immune-mediated skin diseases including bullous skin diseases, erythema multiforme and contact dermatitis, psoriasis, allergic diseases such as asthma, allergic rhinitis, atopic dermatitis, food hypersensitivity and urticaria, immunologic diseases of the lung such as eosinophilic pneumonias, idiopathic pulmonary fibrosis and hypersensitivity pneumonitis, transplantation associated diseases including graft rejection and graft -versus-host-disease. Infectious diseases including viral diseases such as AIDS (HIV infection), hepatitis A, B, C, D, and E, herpes, etc., bacterial infections, fungal infections, protozoal infections and parasitic infections.

[0862] The term “effective amount” is a concentration or amount of a PRO polypeptide and/or agonist/antagonist which results in achieving a particular stated purpose. An “effective amount” of a PRO polypeptide or agonist or antagonist thereof may be determined empirically. Furthermore, a “therapeutically effective amount” is a concentration or amount of a PRO polypeptide and/or agonist/antagonist which is effective for achieving a stated therapeutic effect. This amount may also be determined empirically.

[0863] The term “cytotoxic agent” as used herein refers to a substance that inhibits or prevents the function of cells and/or causes destruction of cells. The term is intended to include radioactive isotopes (e.g., I¹³¹, I¹²⁵, Y⁹⁰ and Re¹⁸⁶), chemotherapeutic agents, and toxins such as enzymatically active toxins of bacterial, fungal, plant or animal origin, or fragments thereof.

[0864] A “chemotherapeutic agent” is a chemical compound useful in the treatment of cancer. Examples of chemotherapeutic agents include adriamycin, doxorubicin, epirubicin, 5-fluorouracil, cytosine arabinoside (“Ara-C”), cyclophosphamide, thiotepa, busulfan, cytoxin, taxoids, e.g., paclitaxel (Taxol, Bristol-Myers Squibb Oncology, Princeton, N.J.), and doxetaxel (Taxotere, Rhône-Poulenc Rorer, Antony, France), toxotere, methotrexate, cisplatin, melphalan, vinblastine, bleomycin, etoposide, ifosfamide, mitomycin C, mitoxantrone, vincristine, vinorelbine, carboplatin, teniposide, daunomycin, carminomycin, aminopterin, dactinomycin, mitomycins, esperamicins (see U.S. Pat. No. 4,675,187), melphalan and other related nitrogen mustards. Also included in this definition are hormonal agents that act to regulate or inhibit hormone action on tumors such as tamoxifen and onapristone.

[0865] A “growth inhibitory agent” when used herein refers to a compound or composition which inhibits growth of a cell, especially cancer cell overexpressing any of the genes identified herein, either in vitro or in vivo. Thus, the growth inhibitory agent is one which significantly reduces the percentage of cells overexpressing such genes in S phase. Examples of growth inhibitory agents include agents that block cell cycle progression (at a place other than S phase), such as agents that induce G1 arrest and M-phase arrest. Classical M-phase blockers include the vincas (vincristine and vinblastine), taxol, and topo II inhibitors such as doxorubicin, epirubicin, daunorubicin, etoposide, and bleomycin. Those agents that arrest G1 also spill over into S-phase arrest, for example, DNA alkylating agents such as tamoxifen, prednisone, dacarbazine, mechlorethamine, cisplatin, methotrexate, 5-fluorouracil, and ara-C. Further information can be found in The Molecular Basis of Cancer, Mendelsohn and Israel, eds., Chapter 1, entitled “Cell cycle regulation, oncogens, and antineoplastic drugs” by Murakami et al. (W B Saunders: Philadelphia, ]995), especially p. 13:

[0866] The term “cytokine” is a generic term for proteins released by one cell population which act on another cell as intercellular mediators. Examples of such cytokines are lymphokines, monokines, and traditional polypeptide hormones. Included among the cytokines are growth hormone such as human growth hormone, N-methionyl human growth hormone, and bovine growth hormone; parathyroid hormone; thyroxine; insulin; proinsulin; relaxin; prorelaxin; glycoprotein hormones such as follicle stimulating hormone (FSH), thyroid stimulating hormone (TSH), and luteinizing hormone (LH); hepatic growth factor; fibroblast growth factor; prolactin; placental lactogen; tumor necrosis factor-α and -β; mullerian-inhibiting substance; mouse gonadotropin-associated peptide; inhibin; activin; vascular endothelial growth factor; integrin; thrombopoietin (TPO); nerve growth factors such as NGF-β; platelet-growth factor; transforming growth factors (TGFs) such as TGF-α and TGF-β; insulin-like growth factor-I and -II; erythropoietin (EPO); osteoinductive factors; interferons such as interferon-α, -β, and -γ, colony stimulating factors (CSFs) such as macrophage-CSF (M-CSF); granulocyte-macrophage-CSF (GM-CSF); and granulocyte-CSF (G-CSF); interleukins (ILs) such as IL-1, IL-1α, IL-2, IL-3, IL-4, IL-5, IL-6, IL-7, IL-8, IL-9, IL-11, IL-12; a tumor necrosis factor such as TNF-α; or TNF-β; and other polypeptide factors including LIF and kit ligand (KL). As used herein, the term cytokine includes proteins from natural sources or from recombinant cell culture and biologically active equivalents of the native sequence cytokines.

[0867] As used herein, the term “immunoadhesin” designates antibody-like molecules which combine the binding specificity of a heterologous protein (an “adhesin”) with the effector functions of immunoglobulin constant domains. Structurally, the immunoadhesins comprise a fusion of an amino acid sequence with the desired binding specificity which is other than the antigen recognition and binding site of an antibody (i.e., is “heterologous”), and an immunoglobulin constant domain sequence. The adhesin part of an immunoadhesin molecule typically is a contiguous amino acid sequence comprising at least the binding site of a receptor or a ligand. The immunoglobulin constant domain sequence in the immunoadhesin may be obtained from any immunoglobulin, such as IgG-1, IgG-2, IgG-3, or IgG-4 subtypes, IgA (including IgA-1 and IgA-2), IgE, IgD or IgM.

[0868] As used herein, the term “inflammatory cells” designates cells that enhance the inflammatory response such as mononuclear cells, eosinophils, macrophages, and polymorphonuclear neutrophils (PMN).

TABLE 2

| | | |
|---|---|---|
| PRO | XXXXXXXXXXXXXXX | (Length = 15 amino acids) |
| Comparison | XXXXXYYYYYYY | (Length = 12 amino acids) |
| Protein | | |

% amino acid sequence identity = (the number of identically matching amino acid residues between the two polypeptide sequences as determined by ALIGN-2) divided by (the total number of amino acid residues of the PRO polypeptide) = 5 divided by 15 = 33.3%

[0869] TABLE 3

| | | |
|---|---|---|
| PRO | XXXXXXXXXX | (Length = 10 amino acids) |
| Comparison | XXXXXYYYYYYZZYZ | (Length = 15 amino acids) |
| Protein | | |

% amino acid sequence identity = (the number of identically matching amino acid residues between the two polypeptide sequences as determined by ALIGN-2) divided by (the total number of amino acid residues of the PRO polypeptide) = 5 divided by 10 = 50%

[0870] TABLE 4

| | | |
|---|---|---|
| PRO-DNA | NNNNNNNNNNNNNN | (Length = 14 nucleotides) |
| Comparison | NNNNNNLLLLLLLLLL | (Length = 16 nucleotides) |
| DNA | | |

% nucleic acid sequence identity = (the number of identically matching nucleotides between the two nucleic acid sequences as determined by ALIGN-2) divided by (the total number of nucleotides of the PRO-DNA nucleic acid sequence) = 6 divided by 14 = 42.9%

[0871] TABLE 5

| | | |
|---|---|---|
| PRO-DNA | NNNNNNNNNNNN | (Length = 12 nucleotides) |
| Comparison DNA | NNNNLLLVV | (Length = 9 nucleotides) |

% nucleic acid sequence identity = (the number of identically matching nucleotides between the two nucleic acid sequences as determined by ALIGN-2) divided by (the total number of nucleotides of the PRO-DNA nucleic acid sequence) = 4 divided by 12 = 33.3%

[0872] II. Compositions and Methods of the Invention

[0873] A. Full-Length PRO Polypeptides

[0874] The present invention provides newly identified and isolated nucleotide sequences encoding polypeptides referred to in the present application as PRO polypeptides. In particular, cDNAs encoding various PRO polypeptides have been identified and isolated, as disclosed in further detail in the Examples below. It is noted that proteins produced in separate expression rounds may be given different PRO numbers but the UNQ number is unique for any given DNA and the encoded protein, and will not be changed. However, for sake of simplicity, in the present specification the protein encoded by the full length native nucleic acid molecules disclosed herein as well as all further native homologues and variants included in the foregoing definition of PRO, will be referred to as “PRO/number”, regardless of their origin or mode of preparation.

[0875] As disclosed in the Examples below, various cDNA clones have been deposited with the ATCC. The actual nucleotide sequences of those clones can readily be determined by the skilled artisan by sequencing of the deposited clone using routine methods in the art. The predicted amino acid sequence can be determined from the nucleotide sequence using routine skill. For the PRO polypeptides and encoding nucleic acids described herein, Applicants have identified what is believed to be the reading frame best identifiable with the sequence information available at the time.

[0876] B. PRO Polypeptide Variants

[0877] In addition to the full-length native sequence PRO polypeptides described herein, it is contemplated that PRO variants can be prepared. PRO variants can be prepared by introducing appropriate nucleotide changes into the PRO DNA, and/or by synthesis of the desired PRO polypeptide. Those skilled in the art will appreciate that amino acid changes may alter post-translational processes of the PRO, such as changing the number or position of glycosylation sites or altering the membrane anchoring characteristics.

[0878] Variations in the native full-length sequence PRO or in various domains of the PRO described herein, can be made, for example, using any of the techniques and guidelines for conservative and non-conservative mutations set forth, for instance, in U.S. Pat. No. 5,364,934. Variations may be a substitution, deletion or insertion of one or more codons encoding the PRO that results in a change in the amino acid sequence of the PRO as compared with the native sequence PRO. Optionally, the variation is by substitution of at least one amino acid with any other amino acid in one or more of the domains of the PRO. Guidance in determining which amino acid residue may be inserted, substituted or deleted without adversely affecting the desired activity may be found by comparing the sequence of the PRO with that of homologous known protein molecules and minimizing the number of amino acid sequence changes made in regions of high homology. Amino acid substitutions can be the result of replacing one amino acid with another amino acid having similar structural and/or chemical properties, such as the replacement of a leucine with a serine, i.e., conservative amino acid replacements. Insertions or deletions may optionally be in the range of about 1 to 5 amino acids. The variation allowed may be determined by systematically making insertions, deletions or substitutions of amino acids in the sequence and testing the resulting variants for activity exhibited by the full-length or mature native sequence.

[0879] PRO polypeptide fragments are provided herein. Such fragments may be truncated at the N-terminus or C-terminus, or may lack internal residues, for example, when compared with a full length native protein. Certain fragments lack amino acid residues that are not essential for a desired biological activity of the PRO polypeptide.

[0880] PRO fragments may be prepared by any of a number of conventional techniques. Desired peptide fragments may be chemically synthesized. An alternative approach involves generating PRO fragments by enzymatic digestion, e.g., by treating the protein with an enzyme known to cleave proteins at sites defined by particular amino acid residues, or by digesting the DNA with suitable restriction enzymes and isolating the desired fragment. Yet another suitable technique involves isolating and amplifying a DNA fragment encoding a desired polypeptide fragment, by polymerase chain reaction (PCR). Oligonucleotides that define the desired termini of the DNA fragment are employed at the 5′ and 3′ primers in the PCR. Preferably, PRO polypeptide fragments share at least one biological and/or immunological activity with the native PRO polypeptide disclosed herein.

[0881] In particular embodiments, conservative substitutions of interest are shown in Table 6 under the heading of preferred substitutions. If such substitutions result in a change in biological activity, then more substantial changes, denominated exemplary substitutions in Table 6, or as further described below in reference to amino acid classes, are introduced and the products screened.

TABLE 6

| Original | Exemplary | Preferred |
|---|---|---|
| Residue | Substitutions | Substitutions |
| Ala (A) | val; leu; ile | val |
| Arg (R) | lys; gln; asn | lys |
| Asn (N) | gln; his; lys; arg | gln |
| Asp (D) | glu | glu |
| Cys (C) | ser | ser |
| Gln (Q) | asn | asn |
| Glu (E) | asp | asp |
| Gly (G) | pro; ala | ala |
| His (H) | asn; gln; lys; arg | arg |
| Ile (I) | leu; val; met; ala; phe; | leu |
| | norleucine | |
| Leu (L) | norleucine; ile; val; | ile |
| | met; ala; phe | |
| Lys (K) | arg; gln; asn | arg |
| Met (M) | leu; phe; ile | leu |
| Phe (F) | leu; val; ile; ala; tyr | leu |
| Pro (P) | ala | ala |
| Ser (S) | thr | thr |
| Thr (T) | ser | ser |
| Trp (W) | tyr; phe | tyr |
| Tyr (Y) | trp; phe; thr; ser | phe |
| Val (V) | ile; leu; met; phe; | leu |
| | ala; norleucine | |

[0882] Substantial modifications in function or immunological identity of the PRO polypeptide are accomplished by selecting substitutions that differ significantly in their effect on maintaining (a) the structure of the polypeptide backbone in the area of the substitution, for example, as a sheet or helical conformation, (b) the charge or hydrophobicity of the molecule at the target site, or (c) the bulk of the side chain. Naturally occurring residues are divided into groups based on common side-chain properties:

[0883] (1) hydrophobic: norleucine, met, ala, val, leu, ile;

[0884] (2) neutral hydrophilic: cys, ser, thr;

[0885] (3) acidic: asp, glu;

[0886] (4) basic: asn, gin, his, lys, arg;

[0887] (5) residues that influence chain orientation: gly, pro; and

[0888] (6) aromatic: trp, tyr, phe.

[0889] Non-conservative substitutions will entail exchanging a member of one of these classes for another class. Such substituted residues also may be introduced into the conservative substitution sites or, more preferably, into the remaining (non-conserved) sites.

[0890] The variations can be made using methods known in the art such as oligonucleotide-mediated (site-directed) mutagenesis, alanine scanning, and PCR mutagenesis. Site-directed mutagenesis [Carter et al., Nucl. Acids Res., 13:4331 (1986); Zoller et al., Nucl. Acids Res., 10:6487 (1987)], cassette mutagenesis [Wells et al., Gene, 34:315 (1985)], restriction selection mutagenesis [Wells et al., Philos. Trans. R. Soc. London SerA, 317:415 (1986)] or other known techniques can be performed on the cloned DNA to produce the PRO variant DNA.

[0891] Scanning amino acid analysis can also be employed to identify one or more amino acids along a contiguous sequence. Among the preferred scanning amino acids are relatively small, neutral amino acids. Such amino acids include alanine, glycine, serine, and cysteine. Alanine is typically a preferred scanning amino acid among this group because it eliminates the side-chain beyond the beta-carbon and is less likely to alter the main-chain conformation of the variant [Cunningham and Wells, Science, 244: 1081-1085 (1989)]. Alanine is also typically preferred because it is the most common amino acid. Further, it is frequently found in both buried and exposed positions [Creighton, The Proteins, (W.H. Freeman & Co., N.Y.); Chothia, J. Mol. Biol., 150:1 (1976)]. If alanine substitution does not yield adequate amounts of variant, an isoteric amino acid can be used.

[0892] C. Modifications of PRO

[0893] Covalent modifications of PRO are included within the scope of this invention. One type of covalent modification includes reacting targeted amino acid residues of a PRO polypeptide with an organic derivatizing agent that is capable of reacting with selected side chains or the N- or C-terminal residues of the PRO. Derivatization with bifunctional agents is useful, for instance, for crosslinking PRO to a water-insoluble support matrix or surface for use in the method for purifying anti-PRO antibodies, and vice-versa. Commonly used crosslinking agents include, e.g., 1,1-bis(diazoacetyl)-2-phenylethane, glutaraldehyde, N-hydroxysuccinimide esters, for example, esters with 4-azidosalicylic acid, homobifunctional imidoesters, including disuccinimidyl esters such as 3,3′-dithiobis(succinimidylpropionate), bifunctional maleimides such as bis-N-maleimido-1,8-octane and agents such as methyl-3-[(p-azidophenyl)dithio]propioimidate.

[0894] Other modifications include deamidation of glutaminyl and asparaginyl residues to the corresponding glutamyl and aspartyl residues, respectively, hydroxylation of proline and lysine, phosphorylation of hydroxyl groups of seryl or threonyl residues, methylation of the (x-amino groups of lysine, arginine, and histidine side chains [T. E. Creighton, Proteins: Structure and Molecular Properties, W.H. Freeman & Co., San Francisco, pp. 79-86 (1983)], acetylation of the N-terminal amine, and amidation of any C-terminal carboxyl group.

[0895] Another type of covalent modification of the PRO polypeptide included within the scope of this invention comprises altering the native glycosylation pattern of the polypeptide. “Altering the native glycosylation pattern” is intended for purposes herein to mean deleting one or more carbohydrate moieties found in native sequence PRO (either by removing the underlying glycosylation site or by deleting the glycosylation by chemical and/or enzymatic means), and/or adding one or more glycosylation sites that are not present in the native sequence PRO. In addition, the phrase includes qualitative changes in the glycosylation of the native proteins, involving a change in the nature and proportions of the various carbohydrate moieties present.

[0896] Addition of glycosylation sites to the PRO polypeptide may be accomplished by altering the amino acid sequence. The alteration may be made, for example, by the addition of, or substitution by, one or more serine or threonine residues to the native sequence PRO (for O-linked glycosylation sites). The PRO amino acid sequence may optionally be altered through changes at the DNA level, particularly by mutating the DNA encoding the PRO polypeptide at preselected bases such that codons are generated that will translate into the desired amino acids.

[0897] Another means of increasing the number of carbohydrate moieties on the PRO polypeptide is by chemical or enzymatic coupling of glycosides to the polypeptide. Such methods are described in the art, e.g., in WO 87/05330 published 11 Sep. 1987, and in Aplin and Wriston, CRC Crit. Rev. Biochem., pp. 259-306 (1981).

[0898] Removal of carbohydrate moieties present on the PRO polypeptide may be accomplished chemically or enzymatically or by mutational substitution of codons encoding for amino acid residues that serve as targets for glycosylation. Chemical deglycosylation techniques are known in the art and described, for instance, by Hakimuddin, et al., Arch. Biochem. Biophys., 259:52 (1987) and by Edge et al., Anal. Biochem., 118:131 (1981). Enzymatic cleavage of carbohydrate moieties on polypeptides can be achieved by the use of a variety of endo- and exo-glycosidases as described by Thotakura et al., Meth. Enzymol., 138:350 (1987).

[0899] Another type of covalent modification of PRO comprises linking the PRO polypeptide to one of a variety of nonproteinaceous polymers, e.g., polyethylene glycol (PEG), polypropylene glycol, or polyoxyalkylenes, in the manner set forth in U.S. Pat. Nos. 4,640,835; 4,496,689; 4,301,144; 4,670,417; 4,791,192 or 4,179,337.

[0900] The PRO of the present invention may also be modified in a way to form a chimeric molecule comprising PRO fused to another, heterologous polypeptide or amino acid sequence.

[0901] In one embodiment, such a chimeric molecule comprises a fusion of the PRO with a tag polypeptide which provides an epitope to which an anti-tag antibody can selectively bind. The epitope tag is generally placed at the amino- or carboxyl-terminus of the PRO. The presence of such epitope-tagged forms of the PRO can be detected using an antibody against the tag polypeptide. Also, provision of the epitope tag enables the PRO to be readily purified by affinity purification using an anti-tag antibody or another type of affinity matrix that binds to the epitope tag. Various tag polypeptides and their respective antibodies are well known in the art. Examples include poly-histidine (poly-his) or poly-histidine-glycine (poly-his-gly) tags; the flu HA tag polypeptide and its antibody 12CA5 [Field et al., Mol. Cell. Biol., 8:2159-2165 (1988)]; the c-myc tag and the 8F9, 3C7, 6E10, G4, B7 and 9E10 antibodies thereto [Evan et al., Molecular and Cellular Biology, 5:3610-3616 (1985)]; and the Herpes Simplex virus glycoprotein D (gD) tag and its antibody [Paborsky et al., Protein Engineering, 3(6):547-553 (1990)]. Other tag polypeptides include the Flag-peptide [Hopp et al., BioTechnology, 6:1204-1210 (1988)]; the KT3 epitope peptide [Martin et al., Science, 255:192-194 (1992)]; an alpha-tubulin epitope peptide [Skinner et al., J. Biol. Chem., 266:15163-15166 (1991)]; and the T7 gene 10 protein peptide tag [Lutz-Freyermuth et al., Proc. Natl. Acad. Sci. USA, 87:6393-6397 (1990)].

[0902] In an alternative embodiment, the chimeric molecule may comprise a fusion of the PRO with an immunoglobulin or a particular region of an immunoglobulin. For a bivalent form of the chimeric molecule (also referred to as an “immunoadhesin”), such a fusion could be to the Fe region of an IgG molecule. The Ig fusions preferably include the substitution of a soluble (transmembrane domain deleted or inactivated) form of a PRO polypeptide in place of at least one variable region within an Ig molecule. In a particularly preferred embodiment, the immunoglobulin fusion includes the hinge, CH2 and CH3, or the hinge, CH1, CH2 and CH3 regions of an IgG1 molecule. For the production of immunoglobulin fusions see also U.S. Pat. No. 5,428,130 issued Jun. 27, 1995.

[0903] D. Preparation of PRO

[0904] The description below relates primarily to production of PRO by culturing cells transformed or transfected with a vector containing PRO nucleic acid. It is, of course, contemplated that alternative methods, which are well known in the art, may be employed to prepare PRO. For instance, the PRO sequence, or portions thereof, may be produced by direct peptide synthesis using solid-phase techniques [see, e.g., Stewart et al., Solid-Phase Peptide Synthesis, W.H. Freeman Co., San Francisco, Calif. (1969); Merrifield, J. Am. Chem. Soc., 85:2149-2154 (1963)]. In vitro protein synthesis may be performed using manual techniques or by automation. Automated synthesis may be accomplished, for instance, using an Applied Biosystems Peptide Synthesizer (Foster City, Calif.) using manufacturer's instructions. Various portions of the PRO may be chemically synthesized separately and combined using chemical or enzymatic methods to produce the full-length PRO.

### 1. Isolation of DNA Encoding PRO

[0905] DNA encoding PRO may be obtained from a cDNA library prepared from tissue believed to possess the PRO mRNA and to express it at a detectable level. Accordingly, human PRO DNA can be conveniently obtained from a cDNA library prepared from human tissue, such as described in the Examples. The PRO-encoding gene may also be obtained from a genomic library or by known synthetic procedures (e.g., automated nucleic acid synthesis).

[0906] Libraries can be screened with probes (such as antibodies to the PRO or oligonucleotides of at least about 20-80 bases) designed to identify the gene of interest or the protein encoded by it. Screening the cDNA or genomic library with the selected probe may be conducted using standard procedures, such as described in Sambrook et al., Molecular Cloning: A Laboratory Manual (New York: Cold Spring Harbor Laboratory Press, 1989). An alternative means to isolate the gene encoding PRO is to use PCR methodology [Sambrook et al., supra; Dieffenbach et al., PCR Primer: A Laboratory Manual (Cold Spring Harbor Laboratory Press, 1995)].

[0907] The Examples below describe techniques for screening a cDNA library. The oligonucleotide sequences selected as probes should be of sufficient length and sufficiently unambiguous that false positives are minimized. The oligonucleotide is preferably labeled such that it can be detected upon hybridization to DNA in the library being screened. Methods of labeling are well known in the art, and include the use of radiolabels like ³²P-labeled ATP, biotinylation or enzyme labeling. Hybridization conditions, including moderate stringency and high stringency, are provided in Sambrook et al., supra.

[0908] Sequences identified in such library screening methods can be compared and aligned to other known sequences deposited and available in public databases such as GenBank or other private sequence databases. Sequence identity (at either the amino acid or nucleotide level) within defined regions of the molecule or across the full-length sequence can be determined using methods known in the art and as described herein.

[0909] Nucleic acid having protein coding sequence may be obtained by screening selected cDNA or genomic libraries using the deduced amino acid sequence disclosed herein for the first time, and, if necessary, using conventional primer extension procedures as described in Sambrook et al., supra, to detect precursors and processing intermediates of mRNA that may not have been reverse-transcribed into cDNA.

### 2. Selection and Transformation of Host Cells

[0910] Host cells are transfected or transformed with expression or cloning vectors described herein for PRO production and cultured in conventional nutrient media modified as appropriate for inducing promoters, selecting transformants, or amplifying the genes encoding the desired sequences. The culture conditions, such as media, temperature, pH and the like, can be selected by the skilled artisan without undue experimentation. In general, principles, protocols, and practical techniques for maximizing the productivity of cell cultures can be found in Mammalian Cell Biotechnology: a Practical Approach, M. Butler, ed. (IRL Press, 1991) and Sambrook et al., supra.

[0911] Methods of eukaryotic cell transfection and prokaryotic cell transformation are known to the ordinarily skilled artisan, for example, CaCl₂, CaPO₄, liposome-mediated and electroporation. Depending on the host cell used, transformation is performed using standard techniques appropriate to such cells. The calcium treatment employing calcium chloride, as described in Sambrook et al., supra, or electroporation is generally used for prokaryotes. Infection with Agrobacterium tumefaciens is used for transformation of certain plant cells, as described by Shaw et al., Gene, 23:315 (1983) and WO 89/05859 published 29 Jun. 1989. For mammalian cells without such cell walls, the calcium phosphate precipitation method of Graham and van der Eb, Virology, 52:456-457 (1978) can be employed. General aspects of mammalian cell host system transfections have been described in U.S. Pat. No. 4,399,216. Transformations into yeast are typically carried out according to the method of Van Solingen et al., J. Bact., 130:946 (1977) and Hsiao et al., Proc. Natl. Acad. Sci. (USA), 76:3829 (1979). However, other methods for introducing DNA into cells, such as by nuclear microinjection, electroporation, bacterial protoplast fusion with intact cells, or polycations, e.g., polybrene, polyornithine, may also be used. For various techniques for transforming mammalian cells, see Keown et al., Methods in Enzymology, 185:527-537 (1990) and Mansour et al., Nature, 336:348-352 (1988).

[0912] Suitable host cells for cloning or expressing the DNA in the vectors herein include prokaryote, yeast, or higher eukaryote cells. Suitable prokaryotes include but are not limited to eubacteria, such as Gram-negative or Gram-positive organisms, for example, Enterobacteriaceae such as E. coli. Various E. coli strains are publicly available, such as E. coli K12 strain MM294 (ATCC 31,446); E. coli X1776 (ATCC 31,537); E. coli strain W3110 (ATCC 27,325) and K5 772 (ATCC 53,635). Other suitable prokaryotic host cells include Enterobacteriaceae such as Escherichia, e.g., E. coli, Enterobacter, Erwinia, Klebsiella, Proteus, Salmonella, e.g., Salmonella typhimurium, Serratia, e.g., Serratia marcescans, and Shigella, as well as Bacilli such as B. subtilis and B. licheniformis (e.g., B. licheniformis 41P disclosed in DD 266,710 published 12 Apr.1989), Pseudomonas such as P. aeruginosa, and Streptomyces. These examples are illustrative rather than limiting. Strain W3110 is one particularly preferred host or parent host because it is a common host strain for recombinant DNA product fermentations. Preferably, the host cell secretes minimal amounts of proteolytic enzymes. For example, strain W3110 may be modified to effect a genetic mutation in the genes encoding proteins endogenous to the host, with examples of such hosts including E. coli W3110 strain 1A2, which has the complete genotype tonA ; E. coli W3110 strain 9E4, which has the complete genotype tonA ptr3; E. coli W3110 strain 27C7 (ATCC 55,244), which has the complete genotype tonA ptr3 phoA E15 (argF-lac)169 degP ompT kat^{r}; E. coli W3110 strain 37D6, which has the complete genotype tonA ptr3 phoA E15 (argF-lac)169 degP ompT rbs7 ilvG kan^{r}; E. coli W3110 strain 40B4, which is strain 37D6 with a non-kanamycin resistant degP deletion mutation; and an E. coli strain having mutant periplasmic protease disclosed in U.S. Pat. No. 4,946,783 issued 7 Aug. 1990. Alternatively, in vitro methods of cloning, e.g., PCR or other nucleic acid polymerase reactions, are suitable.

[0913] In addition to prokaryotes, eukaryotic microbes such as filamentous fungi or yeast are suitable cloning or expression hosts for PRO-encoding vectors. Saccharomyces cerevisiae is a commonly used lower eukaryotic host microorganism. Others include Schizosaccharomyces pombe (Beach and Nurse, Nature, 290: 140 [1981]; EP 139,383 published 2 May 1985); Kluyveromyces hosts (U.S. Pat. No. 4,943,529; Fleer et al., Bio/Technology, 9:968-975 (1991)) such as, e.g., K. lactis (MW98-8C, CBS683, CBS4574; Louvencourt et al., J. Bacteriol., 154(2):737-742 [1983]), K. fragilis (ATCC 12,424), K. bulgaricus (ATCC 16,045), K. wickeramii (ATCC 24,178), K. waltii (ATCC 56,500), K. drosophilarum (ATCC 36,906; Van den Berg et al., Bio/Technology, 8:135 (1990)), K. thermotolerans, and K. marxianus; yarrowia (EP 402,226); Pichia pastoris (EP 183,070; Sreekrishna et al., J. Basic Microbiol., 28:265-278 [1988]); Candida; Trichoderma reesia (EP 244,234); Neurospora crassa (Case et al., Proc. Natl. Acad. Sci. USA, 76:5259-5263 [1979]); Schwanniomyces such as Schwanniomyces occidentalis (EP 394,538 published 31 Oct. 1990); and filamentous fungi such as, e.g., Neurospora, Penicillium, Tolypocladium (WO 91/00357 published 10 Jan. 1991), and Aspergillus hosts such as A. nidulans (Ballance et al., Biochem. Biophys. Res. Commun., 112:284-289 [1983]; Tilburn et al., Gene, 26:205-221 [1983]; Yelton et al., Proc. Natl. Acad. Sci. USA, 81: 1470-1474 [1984]) and A. niger (Kelly and Hynes, EMBO J., 4:475-479 [1985]). Methylotropic yeasts are suitable herein and include, but are not limited to, yeast capable of growth on methanol selected from the genera consisting of Hansenula, Candida, Kloeckera, Pichia, Saccharomyces, Torulopsis, and Rhodotorula. A list of specific species that are exemplary of this class of yeasts may be found in C. Anthony, The Biochemistry of Methylotrophs, 269 (1982).

[0914] Suitable host cells for the expression of glycosylated PRO are derived from multicellular organisms. Examples of invertebrate cells include insect cells such as Drosophila S2 and Spodoptera Sf9, as well as plant cells. Examples of useful mammalian host cell lines include Chinese hamster ovary (CHO) and COS cells. More specific examples include monkey kidney CV1 line transformed by SV40 (COS-7, ATCC CRL 1651); human embryonic kidney line (293 or 293 cells subcloned for growth in suspension culture, Graham et al., J. Gen Virol., 36:59 (1977)); Chinese hamster ovary cells/-DHFR (CHO, Urlaub and Chasin, Proc. Natl. Acad. Sci. USA, 77:4216 (1980)); mouse sertoli cells (TM4, Mather, Biol. Reprod., 23:243-251 (1980)); human lung cells (W138, ATCC CCL 75); human liver cells (Hep G2, HB 8065); and mouse mammary tumor (MMT 060562, ATCC CCL51). The selection of the appropriate host cell is deemed to be within the skill in the art.

### 3. Selection and Use of a Replicable Vector

[0915] The nucleic acid (e.g., cDNA or genomic DNA) encoding PRO may be inserted into a replicable vector for cloning (amplification of the DNA) or for expression. Various vectors are publicly available. The vector may, for example, be in the form of a plasmid, cosmid, viral particle, or phage. The appropriate nucleic acid sequence may be inserted into the vector by a variety of procedures. In general, DNA is inserted into an appropriate restriction endonuclease site(s) using techniques known in the art. Vector components generally include, but are not limited to, one or more of a signal sequence, an origin of replication, one or more marker genes, an enhancer element, a promoter, and a transcription termination sequence. Construction of suitable vectors containing one or more of these components employs standard ligation techniques which are known to the skilled artisan.

[0916] The PRO may be produced recombinantly not only directly, but also as a fusion polypeptide with a heterologous polypeptide, which may be a signal sequence or other polypeptide having a specific cleavage site at the N-terminus of the mature protein or polypeptide. In general, the signal sequence may be a component of the vector, or it may be a part of the PRO-encoding DNA that is inserted into the vector. The signal sequence may be a prokaryotic signal sequence selected, for example, from the group of the alkaline phosphatase, penicillinase, lpp, or heat-stable enterotoxin II leaders. For yeast secretion the signal sequence may be, e.g., the yeast invertase leader, alpha factor leader (including Saccharomyces and Kluyveromyces α-factor leaders, the latter described in U.S. Pat. No. 5,010,182), or acid phosphatase leader, the C. albicans glucoamylase leader (EP 362,179 published 4 Apr. 1990), or the signal described in WO 90/13646 published 15 Nov. 1990. In mammalian cell expression, mammalian signal sequences may be used to direct secretion of the protein, such as signal sequences from secreted polypeptides of the same or related species, as well as viral secretory leaders.

[0917] Both expression and cloning vectors contain a nucleic acid sequence that enables the vector to replicate in one or more selected host cells. Such sequences are well known for a variety of bacteria, yeast, and viruses. The origin of replication from the plasmid pBR322 is suitable for most Gram-negative bacteria, the 2μ plasmid origin is suitable for yeast, and various viral origins (SV40, polyoma, adenovirus, VSV or BPV) are useful for cloning vectors in mammalian cells.

[0918] Expression and cloning vectors will typically contain a selection gene, also termed a selectable marker. Typical selection genes encode proteins that (a) confer resistance to antibiotics or other toxins, e.g., ampicillin, neomycin, methotrexate, or tetracycline, (b) complement auxotrophic deficiencies, or (c) supply critical nutrients not available from complex media, e.g., the gene encoding D-alanine racemase for Bacilli.

[0919] An example of suitable selectable markers for mammalian cells are those that enable the identification of cells competent to take up the PRO-encoding nucleic acid, such as DHFR or thymidine kinase. An appropriate host cell when wild-type DHFR is employed is the CHO cell line deficient in DHFR activity, prepared and propagated as described by Urlaub et al., Proc. Natl. Acad. Sci. USA, 77:4216 (1980). A suitable selection gene for use in yeast is the trp1 gene present in the yeast plasmid YRp7 [Stinchcomb et al., Nature, 282:39 (1979); Kingsman et al., Gene, 7:141 (1979); Tschemper et al., Gene, 10:157 (1980)]. The trp1 gene provides a selection marker for a mutant strain of yeast lacking the ability to grow in tryptophan, for example, ATCC No. 44076 or PEP4-1 [Jones, Genetics, 85:12 (1977)].

[0920] Expression and cloning vectors usually contain a promoter operably linked to the PRO-encoding nucleic acid sequence to direct mRNA synthesis. Promoters recognized by a variety of potential host cells are well known. Promoters suitable for use with prokaryotic hosts include the β-lactamase and lactose promoter systems [Chang et al., Nature, 275:615 (1978); Goeddel et al., Nature, 281:544 (1979)], alkaline phosphatase, a tryptophan (trp) promoter system [Goeddel, Nucleic Acids Res., 8:4057 (1980); EP 36,776], and hybrid promoters such as the tac promoter [deBoer et al., Proc. Natl. Acad. Sci. USA, 80:21-25 (1983)]. Promoters for use in bacterial systems also will contain a Shine-Dalgarno (S.D.) sequence operably linked to the DNA encoding PRO.

[0921] Examples of suitable promoting sequences for use with yeast hosts include the promoters for 3-phosphoglycerate kinase [Hitzeman et al., J. Biol. Chem., 255:2073 (1980)] or other glycolytic enzymes [Hess et al., J. Adv. Enzyme Reg., 7:149 (1968); Holland, Biochemistry, 17:4900 (1978)], such as enolase, glyceraldehyde-3-phosphate dehydrogenase, hexokinase, pyruvate decarboxylase, phosphofructokinase, glucose-6-phosphate isomerase, 3-phosphoglycerate mutase, pyruvate kinase, triosephosphate isomerase, phosphoglucose isomerase, and glucokinase.

[0922] Other yeast promoters, which are inducible promoters having the additional advantage of transcription controlled by growth conditions, are the promoter regions for alcohol dehydrogenase 2, isocytochrome C, acid phosphatase, degradative enzymes associated with nitrogen metabolism, metallothionein, glyceraldehyde-3-phosphate dehydrogenase, and enzymes responsible for maltose and galactose utilization. Suitable vectors and promoters for use in yeast expression are further described in EP 73,657.

[0923] PRO transcription from vectors in mammalian host cells is controlled, for example, by promoters obtained from the genomes of viruses such as polyoma virus, fowlpox virus (UK 2,211,504 published 5 Jul. 1989), adenovirus (such as Adenovirus 2), bovine papilloma virus, avian sarcoma virus, cytomegalovirus, a retrovirus, hepatitis-B virus and Simian Virus 40 (SV40), from heterologous mammalian promoters, e.g., the actin promoter or an immunoglobulin promoter, and from heat-shock promoters, provided such promoters are compatible with the host cell systems.

[0924] Transcription of a DNA encoding the PRO by higher eukaryotes may be increased by inserting an enhancer sequence into the vector. Enhancers are cis-acting elements of DNA, usually about from 10 to 300 bp, that act on a promoter to increase its transcription. Many enhancer sequences are now known from mammalian genes (globin, elastase, albumin, α-fetoprotein, and insulin). Typically, however, one will use an enhancer from a eukaryotic cell virus. Examples include the SV40 enhancer on the late side of the replication origin (bp 100-270), the cytomegalovirus early promoter enhancer, the polyoma enhancer on the late side of the replication origin, and adenovirus enhancers. The enhancer may be spliced into the vector at a position 5′ or 3′ to the PRO coding sequence, but is preferably located at a site 5′ from the promoter.

[0925] Expression vectors used in eukaryotic host cells (yeast, fungi, insect, plant, animal, human, or nucleated cells from other multicellular organisms) will also contain sequences necessary for the termination of transcription and for stabilizing the mRNA. Such sequences are commonly available from the 5′ and, occasionally 3′, untranslated regions of eukaryotic or viral DNAs or cDNAs. These regions contain nucleotide segments transcribed as polyadenylated fragments in the untranslated portion of the mRNA encoding PRO.

[0926] Still other methods, vectors, and host cells suitable for adaptation to the synthesis of PRO in recombinant vertebrate cell culture are described in Gething et al., Nature, 293:620-625 (1981); Mantei et al., Nature, 281:40-46 (1979); EP 117,060; and EP 117,058.

### 4. Detecting Gene Amplification/Expression

[0927] Gene amplification and/or expression may be measured in a sample directly, for example, by conventional Southern blotting, Northern blotting to quantitate the transcription of mRNA [Thomas, Proc. Natl. Acad. Sci. USA, 77:5201-5205 (1980)], dot blotting (DNA analysis), or in situ hybridization, using an appropriately labeled probe, based on the sequences provided herein. Alternatively, antibodies may be employed that can recognize specific duplexes, including DNA duplexes, RNA duplexes, and DNA-RNA hybrid duplexes or DNA-protein duplexes. The antibodies in turn may be labeled and the assay may be carried out where the duplex is bound to a surface, so that upon the formation of duplex on the surface, the presence of antibody bound to the duplex can be detected.

[0928] Gene expression, alternatively, may be measured by immunological methods, such as immunohistochemical staining of cells or tissue sections and assay of cell culture or body fluids, to quantitate directly the expression of gene product. Antibodies useful for immunohistochemical staining and/or assay of sample fluids may be either monoclonal or polyclonal, and may be prepared in any mammal. Conveniently, the antibodies may be prepared against a native sequence PRO polypeptide or against a synthetic peptide based on the DNA sequences provided herein or against exogenous sequence fused to PRO DNA and encoding a specific antibody epitope.

### 5. Purification of Polypeptide

[0929] Forms of PRO may be recovered from culture medium or from host cell lysates. If membrane-bound, it can be released from the membrane using a suitable detergent solution (e.g. Triton-X 100) or by enzymatic cleavage. Cells employed in expression of PRO can be disrupted by various physical or chemical means, such as freeze-thaw cycling, sonication, mechanical disruption, or cell lysing agents.

[0930] It may be desired to purify PRO from recombinant cell proteins or polypeptides. The following procedures are exemplary of suitable purification procedures: by fractionation on an ion-exchange column; ethanol precipitation; reverse phase HPLC; chromatography on silica or on a cation-exchange resin such as DEAE; chromatofocusing; SDS-PAGE; ammonium sulfate precipitation; gel filtration using, for example, Sephadex G-75; protein A Sepharose columns to remove contaminants such as IgG; and metal chelating columns to bind epitope-tagged forms of the PRO. Various methods of protein purification may be employed and such methods are known in the art and described for example in Deutscher, Methods in Enzymology, 182 (1990); Scopes, Protein Purification: Principles and Practice, Springer-Verlag, New York (1982). The purification step(s) selected will depend, for example, on the nature of the production process used and the particular PRO produced.

[0931] E. Tissue Distribution

[0932] The location of tissues expressing the PRO can be identified by determining mRNA expression in various human tissues. The location of such genes provides information about which tissues are most likely to be affected by the stimulating and inhibiting activities of the PRO polypeptides. The location of a gene in a specific tissue also provides sample tissue for the activity blocking assays discussed below.

[0933] As noted before, gene expression in various tissues may be measured by conventional Southern blotting, Northern blotting to quantitate the transcription of mRNA (Thomas, Proc. Natl. Acad. Sci. USA, 77:5201-5205 [19801), dot blotting (DNA analysis), or in situ hybridization, using an appropriately labeled probe, based on the sequences provided herein. Alternatively, antibodies may be employed that can recognize specific duplexes, including DNA duplexes, RNA duplexes, and DNA-RNA hybrid duplexes or DNA-protein duplexes.

[0934] Gene expression in various tissues, alternatively, may be measured by immunological methods, such as immunohistochemical staining of tissue sections and assay of cell culture or body fluids, to quantitate directly the expression of gene product. Antibodies useful for immunohistochemical staining and/or assay of sample fluids may be either monoclonal or polyclonal, and may be prepared in any mammal. Conveniently, the antibodies may be prepared against a native sequence of a PRO polypeptide or against a synthetic peptide based on the DNA sequences encoding the PRO polypeptide or against an exogenous sequence fused to a DNA encoding a PRO polypeptide and encoding a specific antibody epitope. General techniques for generating antibodies, and special protocols for Northern blotting and in situ hybridization are provided below.

[0935] F. Antibody Binding Studies

[0936] The activity of the PRO polypeptides can be further verified by antibody binding studies, in which the ability of anti-PRO antibodies to inhibit the effect of the PRO polypeptides, respectively, on tissue cells is tested. Exemplary antibodies include polyclonal, monoclonal, humanized, bispecific, and heteroconjugate antibodies, the preparation of which will be described hereinbelow.

[0937] Antibody binding studies may be carried out in any known assay method, such as competitive binding assays, direct and indirect sandwich assays, and immunoprecipitation assays. Zola, Monoclonal Antibodies: A Manual of Techniques, pp. 147-158 (CRC Press, Inc., 1987).

[0938] Competitive binding assays rely on the ability of a labeled standard to compete with the test sample analyte for binding with a limited amount of antibody. The amount of target protein in the test sample is inversely proportional to the amount of standard that becomes bound to the antibodies. To facilitate determining the amount of standard that becomes bound, the antibodies preferably are insolubilized before or after the competition, so that the standard and analyte that are bound to the antibodies may conveniently be separated from the standard and analyte which remain unbound.

[0939] Sandwich assays involve the use of two antibodies, each capable of binding to a different immunogenic portion, or epitope, of the protein to be detected. In a sandwich assay, the test sample analyte is bound by a first antibody which is immobilized on a solid support, and thereafter a second antibody binds to the analyte, thus forming an insoluble three-part complex. See, e.g., U.S. Pat. No. 4,376,110. The second antibody may itself be labeled with a detectable moiety (direct sandwich assays) or may be measured using an anti-immunoglobulin antibody that is labeled with a detectable moiety (indirect sandwich assay). For example, one type of sandwich assay is an ELISA assay, in which case the detectable moiety is an enzyme.

[0940] For immunohistochemistry, the tissue sample may be fresh or frozen or may be embedded in paraffin and fixed with a preservative such as formalin, for example.

[0941] G. Cell-Based Assays

[0942] Cell-based assays and animal models for immune-related diseases can be used to further understand the relationship between the genes and polypeptides identified herein and the development and pathogenesis of immune related disease.

[0943] In a different approach, cells of a cell type known to be involved in a particular immune related disease are transfected with the cDNAs described herein, and the ability of these cDNAs to stimulate or inhibit immune function is analyzed. Suitable cells can be transfected with the desired gene, and monitored for immune function activity. Such transfected cell lines can then be used to test the ability of poly- or monoclonal antibodies or antibody compositions to inhibit or stimulate immune function, for example to modulate T-cell proliferation or inflammatory cell infiltration. Cells transfected with the coding sequences of the genes identified herein can further be used to identify drug candidates for the treatment of immune related diseases.

[0944] In addition, primary cultures derived from transgenic animals (as described below) can be used in the cell-based assays herein, although stable cell lines are preferred. Techniques to derive continuous cell lines from transgenic animals are well known in the art (see, e.g., Small et al., Mol. Cell. Biol. 5: 642-648 [19851).

[0945] One suitable cell based assay is the mixed lymphocyte reaction (MLR). Current Protocols in Immunology, unit 3.12; edited by J E Coligan, A M Kruisbeek, D H Marglies, E M Shevach, W Strober, National Institutes of Health, Published by John Wiley & Sons, Inc. In this assay, the ability of a test compound to stimulate or inhibit the proliferation of activated T cells is assayed. A suspension of responder T cells is cultured with allogeneic stimulator cells and the proliferation of T cells is measured by uptake of tritiated thymidine. This assay is a general measure of T cell reactivity. Since the majority of T cells respond to and produce IL-2 upon activation, differences in responsiveness in this assay in part reflect differences in IL-2 production by the responding cells. The MLR results can be verified by a standard lymphokine (IL-2) detection assay. Current Protocols in Immunology, above, 3.15, 6.3.

[0946] A proliferative T cell response in an MLR assay may be due to direct mitogenic properties of an assayed molecule or to external antigen induced activation. Additional verification of the T cell stimulatory activity of the PRO polypeptides can be obtained by a costimulation assay. T cell activation requires an antigen specific signal mediated through the T-cell receptor (TCR) and a costimulatory signal mediated through a second ligand binding interaction, for example, the B7 (CD80, CD86)/CD28 binding interaction. CD28 crosslinking increases lymphokine secretion by activated T cells. T cell activation has both negative and positive controls through the binding of ligands which have a negative or positive effect. CD28 and CTLA-4 are related glycoproteins in the Ig superfamily which bind to B7. CD28 binding to B7 has a positive costimulation effect of T cell activation; conversely, CTLA-4 binding to B7 has a T cell deactivating effect. Chambers, C. A. and Allison, J. P., Curr. Opin. Immunol. (1997) 9:396. Schwartz, R. H., Cell (1992) 71:1065; Linsey, P. S. and Ledbetter, J. A., Annu. Rev. Immunol. (1993) 11:191; June, C. H. et al, Immunol. Today (1994) 15:321; Jenkins, M. K., Immunity (1994) 1:405. In a costimulation assay, the PRO polypeptides are assayed for T cell costimulatory or inhibitory activity.

[0947] Direct use of a stimulating compound as in the invention has been validated in experiments with 4-1BB glycoprotein, a member of the tumor necrosis factor receptor family, which binds to a ligand (4-1BBL) expressed on primed T cells and signals T cell activation and growth. Alderson, M. E. et al., J. Immunol. (1994) 24:2219.

[0948] The use of an agonist stimulating compound has also been validated experimentally. Activation of 4-1BB by treatment with an agonist anti-4-1BB antibody enhances eradication of tumors. Hellstrom, I. and Hellstrom, K. E., Crit. Rev. Immunol. (1998) 18:1. Immunoadjuvant therapy for treatment of tumors, described in more detail below, is another example of the use of the stimulating compounds of the invention.

[0949] Alternatively, an immune stimulating or enhancing effect can also be achieved by administration of a PRO which has vascular permeability enhancing properties. Enhanced vascular permeability would be beneficial to disorders which can be attenuated by local infiltration of immune cells (e.g., monocytes, eosinophils, PMNs) and inflammation.

[0950] On the other hand, PRO polypeptides, as well as other compounds of the invention, which are direct inhibitors of T cell proliferation/activation, lymphokine secretion, and/or vascular permeability can be directly used to suppress the immune response. These compounds are useful to reduce the degree of the immune response and to treat immune related diseases characterized by a hyperactive, superoptimal, or autoimmune response. This use of the compounds of the invention has been validated by the experiments described above in which CTLA-4 binding to receptor B7 deactivates T cells. The direct inhibitory compounds of the invention function in an analogous manner. The use of compound which suppress vascular permeability would be expected to reduce inflammation. Such uses would be beneficial in treating conditions associated with excessive inflammation.

[0951] Alternatively, compounds, e.g., antibodies, which bind to stimulating PRO polypeptides and block the stimulating effect of these molecules produce a net inhibitory effect and can be used to suppress the T cell mediated immune response by inhibiting T cell proliferation/activation and/or lymphokine secretion. Blocking the stimulating effect of the polypeptides suppresses the immune response of the mammal. This use has been validated in experiments using an anti-IL2 antibody. In these experiments, the antibody binds to IL2 and blocks binding of IL2 to its receptor thereby achieving a T cell inhibitory effect.

[0952] H. Animal Models

[0953] The results of the cell based in vitro assays can be further verified using in vivo animal models and assays for T-cell function. A variety of well known animal models can be used to further understand the role of the genes identified herein in the development and pathogenesis of immune related disease, and to test the efficacy of candidate therapeutic agents, including antibodies, and other antagonists of the native polypeptides, including small molecule antagonists. The in vivo nature of such models makes them predictive of responses in human patients. Animal models of immune related diseases include both non-recombinant and recombinant (transgenic) animals. Non-recombinant animal models include, for example, rodent, e.g., murine models. Such models can be generated by introducing cells into syngeneic mice using standard techniques, e.g., subcutaneous injection, tail vein injection, spleen implantation, intraperitoneal implantation, implantation under the renal capsule, etc.

[0954] Graft-versus-host disease occurs when immunocompetent cells are transplanted into immunosuppressed or tolerant patients. The donor cells recognize and respond to host antigens. The response can vary from life threatening severe inflammation to mild cases of diarrhea and weight loss. Graft-versus-host disease models provide a means of assessing T cell reactivity against MHC antigens and minor transplant antigens. A suitable procedure is described in detail in Current Protocols in Immunology, above, unit 4.3.

[0955] An animal model for skin allograft rejection is a means of testing the ability of T cells to mediate in vivo tissue destruction and a measure of their role in transplant rejection. The most common and accepted models use murine tail-skin grafts. Repeated experiments have shown that skin allograft rejection is mediated by T cells, helper T cells and killer-effector T cells, and not antibodies. Auchincloss, H. Jr. and Sachs, D. H., Fundamental Immunology, 2nd ed., W. E. Paul ed., Raven Press, NY, 1989, 889-992. A suitable procedure is described in detail in Current Protocols in Immunology, above, unit 4.4. Other transplant rejection models which can be used to test the compounds of the invention are the allogeneic heart transplant models described by Tanabe, M. et al, Transplantation (1994) 58:23 and Tinubu, S. A. et al, J. Immunol. (1994) 4330-4338.

[0956] Animal models for delayed type hypersensitivity provides an assay of cell mediated immune function as well. Delayed type hypersensitivity reactions are a T cell mediated in vivo immune response characterized by inflammation which does not reach a peak until after a period of time has elapsed after challenge with an antigen. These reactions also occur in tissue specific autoimmune diseases such as multiple sclerosis (MS) and experimental autoimmune encephalomyelitis (EAE, a model for MS). A suitable procedure is described in detail in Current Protocols in Immunology, above, unit 4.5.

[0957] EAE is a T cell mediated autoimmune disease characterized by T cell and mononuclear cell inflammation and subsequent demyelination of axons in the central nervous system. EAE is generally considered to be a relevant animal model for MS in humans. Bolton, C., Multiple Sclerosis (1995) 1:143. Both acute and relapsing-remitting models have been developed. The compounds of the invention can be tested for T cell stimulatory or inhibitory activity against immune mediated demyelinating disease using the protocol described in Current Protocols in Immunology, above, units 15.1 and 15.2. See also the models for myelin disease in which oligodendrocytes or Schwann cells are grafted into the central nervous system as described in Duncan, I. D. et al, Molec. Med. Today (1997) 554-561.

[0958] Contact hypersensitivity is a simple delayed type hypersensitivity in vivo assay of cell mediated immune function. In this procedure, cutaneous exposure to exogenous haptens which gives rise to a delayed type hypersensitivity reaction which is measured and quantitated. Contact sensitivity involves an initial sensitizing phase followed by an elicitation phase. The elicitation phase occurs when the T lymphocytes encounter an antigen to which they have had previous contact. Swelling and inflammation occur, making this an excellent model of human allergic contact dermatitis. A suitable procedure is described in detail in Current Protocols in Immunology, Eds. J. E. Cologan, A. M. Kruisbeek, D. H. Margulies, E. M. Shevach and W. Strober, John Wiley & Sons, Inc., 1994, unit 4.2. See also Grabbe, S. and Schwarz, T, Immun. Today 19 (1): 37-44 (1998).

[0959] An animal model for arthritis is collagen-induced arthritis. This model shares clinical, histological and immunological characteristics of human autoimmune rheumatoid arthritis and is an acceptable model for human autoimmune arthritis. Mouse and rat models are characterized by synovitis, erosion of cartilage and subchondral bone. The compounds of the invention can be tested for activity against autoimmune arthritis using the protocols described in Current Protocols in Immunology, above, units 15.5. See also the model using a monoclonal antibody to CD18 and VLA-4 integrins described in Issekutz, A. C. et al., Immunology (1996) 88:569.

[0960] A model of asthma has been described in which antigen-induced airway hyper-reactivity, pulmonary eosinophilia and inflammation are induced by sensitizing an animal with ovalbumin and then challenging the animal with the same protein delivered by aerosol. Several animal models (guinea pig, rat, non-human primate) show symptoms similar to atopic asthma in humans upon challenge with aerosol antigens. Murine models have many of the features of human asthma. Suitable procedures to test the compounds of the invention for activity and effectiveness in the treatment of asthma are described by Wolyniec, W. W. et al, Am. J. Respir. Cell Mol. Biol. (1998) 18:777 and the references cited therein.

[0961] Additionally, the compounds of the invention can be tested on animal models for psoriasis like diseases. Evidence suggests a T cell pathogenesis for psoriasis. The compounds of the invention can be tested in the scid/scid mouse model described by Schon, M. P. et al, Nat. Med. (1997) 3:183, in which the mice demonstrate histopathologic skin lesions resembling psoriasis. Another suitable model is the human skin/scid mouse chimera prepared as described by Nickoloff, B. J. et al, Am. J. Path. (1995) 146:580.

[0962] Recombinant (transgenic) animal models can be engineered by introducing the coding portion of the genes identified herein into the genome of animals of interest, using standard techniques for producing transgenic animals. Animals that can serve as a target for transgenic manipulation include, without limitation, mice, rats, rabbits, guinea pigs, sheep, goats, pigs, and non-human primates, e.g., baboons, chimpanzees and monkeys. Techniques known in the art to introduce a transgene into such animals include pronucleic microinjection (Hoppe and Wanger, U.S. Pat. No. 4,873,191); retrovirus-mediated gene transfer into germ lines (e.g., Van der Putten et al., Proc. Natl. Acad. Sci. USA 82, 6148-615 [1985]); gene targeting in embryonic stem cells (Thompson et al, Cell 56, 313-321 [1989]); electroporation of embryos (Lo, Mol. Cel Biol. 3, 1803-1814 [1983]); sperm-mediated gene transfer (Lavitrano et al., Cell 57, 717-73 [1989]). For review, see, for example, U.S. Pat. No. 4,736,866.

[0963] For the purpose of the present invention, transgenic animals include those that carry the transgene only in part of their cells (“mosaic animals”). The transgene can be integrated either as a single transgene, or in concatamers, e.g., head-to-head or head-to-tail tandems. Selective introduction of a transgene into a particular cell type is also possible by following, for example, the technique of Lasko et al., Proc. Natl. Acad. Sci. USA 89, 6232-636 (1992).

[0964] The expression of the transgene in transgenic animals can be monitored by standard techniques. For example, Southern blot analysis or PCR amplification can be used to verify the integration of the transgene. The level of mRNA expression can then be analyzed using techniques such as in situ hybridization, Northern blot analysis, PCR, or immunocytochemistry.

[0965] The animals may be further examined for signs of immune disease pathology, for example by histological examination to determine infiltration of immune cells into specific tissues. Blocking experiments can also be performed in which the transgenic animals are treated with the compounds of the invention to determine the extent of the T cell proliferation stimulation or inhibition of the compounds. In these experiments, blocking antibodies which bind to the PRO polypeptide, prepared as described above, are administered to the animal and the effect on immune function is determined.

[0966] Alternatively, “knock out” animals can be constructed which have a defective or altered gene encoding a polypeptide identified herein, as a result of homologous recombination between the endogenous gene encoding the polypeptide and altered genomic DNA encoding the same polypeptide introduced into an embryonic cell of the animal. For example, cDNA encoding a particular polypeptide can be used to clone genomic DNA encoding that polypeptide in accordance with established techniques. A portion of the genomic DNA encoding a particular polypeptide can be deleted or replaced with another gene, such as a gene encoding a selectable marker which can be used to monitor integration. Typically, several kilobases of unaltered flanking DNA (both at the 5′ and 3′ ends) are included in the vector [see e.g., Thomas and Capecchi, Cell, 51:503 (1987) for a description of homologous recombination vectors]. The vector is introduced into an embryonic stem cell line (e.g., by electroporation) and cells in which the introduced DNA has homologously recombined with the endogenous DNA are selected [see e.g., Li et al., Cell, 69:915 (1992)1. The selected cells are then injected into a blastocyst of an animal (e.g., a mouse or rat) to form aggregation chimeras [see e.g., Bradley, in Teratocarcinomas and Embryonic Stem Cells: A Practical Approach, E. J. Robertson, ed. (IRL, Oxford, 1987), pp. 113-152]. A chimeric embryo can then be implanted into a suitable pseudopregnant female foster animal and the embryo brought to term to create a “knock out” animal. Progeny harboring the homologously recombined DNA in their germ cells can be identified by standard techniques and used to breed animals in which all cells of the animal contain the homologously recombined DNA. Knockout animals can be characterized for instance, for their ability to defend against certain pathological conditions and for their development of pathological conditions due to absence of the polypeptide.

[0967] I. ImmunoAdjuvant Therapy

[0968] In one embodiment, the immunostimulating compounds of the invention can be used in immunoadjuvant therapy for the treatment of tumors (cancer). It is now well established that T cells recognize human tumor specific antigens. One group of tumor antigens, encoded by the MAGE, BAGE and GAGE families of genes, are silent in all adult normal tissues , but are expressed in significant amounts in tumors, such as melanomas, lung tumors, head and neck tumors, and bladder carcinomas. DeSmet, C. et al., (1996) Proc. Natl. Acad. Sci. USA, 93:7149. It has been shown that costimulation of T cells induces tumor regression and an antitumor response both in vitro and in vivo. Melero, I. et al., Nature Medicine (1997) 3:682; Kwon, E. D. et al., Proc. Natl. Acad. Sci. USA (1997) 94: 8099; Lynch, D. H. et al, Nature Medicine (1997) 3:625; Finn, O. J. and Lotze, M. T., J. Immunol. (1998) 21:114. The stimulatory compounds of the invention can be administered as adjuvants, alone or together with a growth regulating agent, cytotoxic agent or chemotherapeutic agent, to stimulate T cell proliferation/activation and an antitumor response to tumor antigens. The growth regulating, cytotoxic, or chemotherapeutic agent may be administered in conventional amounts using known administration regimes. Immunostimulating activity by the compounds of the invention allows reduced amounts of the growth regulating, cytotoxic, or chemotherapeutic agents thereby potentially lowering the toxicity to the patient.

[0969] J. Screening Assays for Drug Candidates

[0970] Screening assays for drug candidates are designed to identify compounds that bind to or complex with the polypeptides encoded by the genes identified herein or a biologically active fragment thereof, or otherwise interfere with the interaction of the encoded polypeptides with other cellular proteins. Such screening assays will include assays amenable to high-throughput screening of chemical libraries, making them particularly suitable for identifying small molecule drug candidates. Small molecules contemplated include synthetic organic or inorganic compounds, including peptides, preferably soluble peptides, (poly)peptide-immunoglobulin fusions, and, in particular, antibodies including, without limitation, poly- and monoclonal antibodies and antibody fragments, single-chain antibodies, anti-idiotypic antibodies, and chimeric or humanized versions of such antibodies or fragments, as well as human antibodies and antibody fragments. The assays can be performed in a variety of formats, including protein-protein binding assays, biochemical screening assays, immunoassays and cell based assays, which are well characterized in the art. All assays are common in that they call for contacting the drug candidate with a polypeptide encoded by a nucleic acid identified herein under conditions and for a time sufficient to allow these two components to interact.

[0971] In binding assays, the interaction is binding and the complex formed can be isolated or detected in the reaction mixture. In a particular embodiment, the polypeptide encoded by the gene identified herein or the drug candidate is immobilized on a solid phase, e.g., on a microtiter plate, by covalent or non-covalent attachments. Non-covalent attachment generally is accomplished by coating the solid surface with a solution of the polypeptide and drying. Alternatively, an immobilized antibody, e.g., a monoclonal antibody, specific for the polypeptide to be immobilized can be used to anchor it to a solid surface. The assay is performed by adding the non-immobilized component, which may be labeled by a detectable label, to the immobilized component, e.g., the coated surface containing the anchored component. When the reaction is complete, the non-reacted components are removed, e.g., by washing, and complexes anchored on the solid surface are detected. When the originally non-immobilized component carries a detectable label, the detection of label immobilized on the surface indicates that complexing occurred. Where the originally non-immobilized component does not carry a label, complexing can be detected, for example, by using a labelled antibody specifically binding the immobilized complex.

[0972] If the candidate compound interacts with but does not bind to a particular protein encoded by a gene identified herein, its interaction with that protein can be assayed by methods well known for detecting protein-protein interactions. Such assays include traditional approaches, such as, cross-linking, co-immunoprecipitation, and co-purification through gradients or chromatographic columns. In addition, protein-protein interactions can be monitored by using a yeast-based genetic system described by Fields and co-workers [Fields and Song, Nature (London) 340, 245-246 (1989); Chien et al., Proc. Natl. Acad. Sci. USA 88, 9578-9582 (1991)] as disclosed by Chevray and Nathans, Proc. Natl. Acad. Sci. USA 89, 5789-5793 (1991). Many transcriptional activators, such as yeast GAL4, consist of two physically discrete modular domains, one acting as the DNA-binding domain, while the other one functioning as the transcription activation domain. The yeast expression system described in the foregoing publications (generally referred to as the “two-hybrid system”) takes advantage of this property, and employs two hybrid proteins, one in which the target protein is fused to the DNA-binding domain of GAL4, and another, in which candidate activating proteins are fused to the activation domain. The expression of a GAL1-lacZ reporter gene under control of a GAL4-activated promoter depends on reconstitution of GAL4 activity via protein-protein interaction. Colonies containing interacting polypeptides are detected with a chromogenic substrate for β-galactosidase. A complete kit (MATCHMAKER™) for identifying protein-protein interactions between two specific proteins using the two-hybrid technique is commercially available from Clontech. This system can also be extended to map protein domains involved in specific protein interactions as well as to pinpoint amino acid residues that are crucial for these interactions.

[0973] In order to find compounds that interfere with the interaction of a gene identified herein and other intra- or extracellular components can be tested, a reaction mixture is usually prepared containing the product of the gene and the intra- or extracellular component under conditions and for a time allowing for the interaction and binding of the two products. To test the ability of a test compound to inhibit binding, the reaction is run in the absence and in the presence of the test compound. In addition, a placebo may be added to a third reaction mixture, to serve as positive control. The binding (complex formation) between the test compound and the intra- or extracellular component present in the mixture is monitored as described above. The formation of a complex in the control reaction(s) but not in the reaction mixture containing the test compound indicates that the test compound interferes with the interaction of the test compound and its reaction partner.

[0974] K. Compositions and Methods for the Treatment of Immune Related Diseases

[0975] The compositions useful in the treatment of immune related diseases include, without limitation, proteins, antibodies, small organic molecules, peptides, phosphopeptides, antisense and ribozyme molecules, triple helix molecules, etc. that inhibit or stimulate immune function, for example, T cell proliferation/activation, lymphokine release, or immune cell infiltration.

[0976] For example, antisense RNA and RNA molecules act to directly block the translation of mRNA by hybridizing to targeted mRNA and preventing protein translation. When antisense DNA is used, oligodeoxyribonucleotides derived from the translation initiation site, e.g., between about -10 and +10 positions of the target gene nucleotide sequence, are preferred.

[0977] Ribozymes are enzymatic RNA molecules capable of catalyzing the specific cleavage of RNA. Ribozymes act by sequence-specific hybridization to the complementary target RNA, followed by endonucleolytic cleavage. Specific ribozyme cleavage sites within a potential RNA target can be identified by known techniques. For further details see, e.g., Rossi, Current Biology 4, 469-471 (1994), and PCT publication No. WO 97/33551 (published Sep. 18, 1997).

[0978] Nucleic acid molecules in triple helix formation used to inhibit transcription should be single-stranded and composed of deoxynucleotides. The base composition of these oligonucleotides is designed such that it promotes triple helix formation via Hoogsteen base pairing rules, which generally require sizeable stretches of purines or pyrimidines on one strand of a duplex. For further details see, e.g., PCT publication No. WO 97/33551, supra.

[0979] These molecules can be identified by any or any combination of the screening assays discussed above and/or by any other screening techniques well known for those skilled in the art.

[0980] L. Anti-PRO Antibodies

[0981] The present invention further provides anti-PRO antibodies. Exemplary antibodies include polyclonal, monoclonal, humanized, bispecific, and heteroconjugate antibodies.

### 1. Polyclonal Antibodies

[0982] The anti-PRO antibodies may comprise polyclonal antibodies. Methods of preparing polyclonal antibodies are known to the skilled artisan. Polyclonal antibodies can be raised in a mammal, for example, by one or more injections of an immunizing agent and, if desired, an adjuvant. Typically, the immunizing agent and/or adjuvant will be injected in the mammal by multiple subcutaneous or intraperitoneal injections. The immunizing agent may include the PRO polypeptide or a fusion protein thereof. It may be useful to conjugate the immunizing agent to a protein known to be immunogenic in the mammal being immunized. Examples of such immunogenic proteins include but are not limited to keyhole limpet hemocyanin, serum albumin, bovine thyroglobulin, and soybean trypsin inhibitor. Examples of adjuvants which may be employed include Freund's complete adjuvant and MPL-TDM adjuvant (monophosphoryl Lipid A, synthetic trehalose dicorynomycolate). The immunization protocol may be selected by one skilled in the art without undue experimentation.

### 2. Monoclonal Antibodies

[0983] The anti-PRO antibodies may, alternatively, be monoclonal antibodies. Monoclonal antibodies may be prepared using hybridoma methods, such as those described by Kohler and Milstein, Nature, 256:495 (1975). In a hybridoma method, a mouse, hamster, or other appropriate host animal, is typically immunized with an immunizing agent to elicit lymphocytes that produce or are capable of producing antibodies that will specifically bind to the immunizing agent. Alternatively, the lymphocytes may be immunized in vitro.

[0984] The immunizing agent will typically include the PRO polypeptide or a fusion protein thereof. Generally, either peripheral blood lymphocytes (“PBLs”) are used if cells of human origin are desired, or spleen cells or lymph node cells are used if non-human mammalian sources are desired. The lymphocytes are then fused with an immortalized cell line using a suitable fusing agent, such as polyethylene glycol, to form a hybridoma cell [Goding, Monoclonal Antibodies: Principles and Practice, Academic Press, (1986) pp. 59-103]. Immortalized cell lines are usually transformed mammalian cells, particularly myeloma cells of rodent, bovine and human origin. Usually, rat or mouse myeloma cell lines are employed. The hybridoma cells may be cultured in a suitable culture medium that preferably contains one or more substances that inhibit the growth or survival of the unfused, immortalized cells. For example, if the parental cells lack the enzyme hypoxanthine guanine phosphoribosyl transferase (HGPRT or HPRT), the culture medium for the hybridomas typically will include hypoxanthine, aminopterin, and thymidine (“HAT medium”), which substances prevent the growth of HGPRT-deficient cells.

[0985] Preferred immortalized cell lines are those that fuse efficiently, support stable high level expression of antibody by the selected antibody-producing cells, and are sensitive to a medium such as HAT medium. More preferred immortalized cell lines are murine myeloma lines, which can be obtained, for instance, from the Salk Institute Cell Distribution Center, San Diego, Calif. and the American Type Culture Collection, Manassas, Va. Human myeloma and mouse-human heteromyeloma cell lines also have been described for the production of human monoclonal antibodies [Kozbor, J. Immunol., 133:3001 (1984); Brodeur et al., Monoclonal Antibody Production Techniques and Applications, Marcel Dekker, Inc., New York, (1987) pp. 51-63].

[0986] The culture medium in which the hybridoma cells are cultured can then be assayed for the presence of monoclonal antibodies directed against PRO. Preferably, the binding specificity of monoclonal antibodies produced by the hybridoma cells is determined by immunoprecipitation or by an in vitro binding assay, such as radioimmunoassay (RIA) or enzyme-linked immunoabsorbent assay (ELISA). Such techniques and assays are known in the art. The binding affinity of the monoclonal antibody can, for example, be determined by the Scatchard analysis of Munson and Pollard, Anal. Biochem., 107:220 (1980).

[0987] After the desired hybridoma cells are identified, the clones may be subcloned by limiting dilution procedures and grown by standard methods [Goding, supra]. Suitable culture media for this purpose include, for example, Dulbecco's Modified Eagle's Medium and RPMI-1640 medium. Alternatively, the hybridoma cells may be grown in vivo as ascites in a mammal.

[0988] The monoclonal antibodies secreted by the subclones may be isolated or purified from the culture medium or ascites fluid by conventional immunoglobulin purification procedures such as, for example, protein A-Sepharose, hydroxylapatite chromatography, gel electrophoresis, dialysis, or affinity chromatography.

[0989] The monoclonal antibodies may also be made by recombinant DNA methods, such as those described in U.S. Pat. No. 4,816,567. DNA encoding the monoclonal antibodies of the invention can be readily isolated and sequenced using conventional procedures (e.g., by using oligonucleotide probes that are capable of binding specifically to genes encoding the heavy and light chains of murine antibodies). The hybridoma cells of the invention serve as a preferred source of such DNA. Once isolated, the DNA may be placed into expression vectors, which are then transfected into host cells such as simian COS cells, Chinese hamster ovary (CHO) cells, or myeloma cells that do not otherwise produce immunoglobulin protein, to obtain the synthesis of monoclonal antibodies in the recombinant host cells. The DNA also may be modified, for example, by substituting the coding sequence for human heavy and light chain constant domains in place of the homologous murine sequences [U.S. Pat. No. 4,816,567; Morrison et al., supra] or by covalently joining to the immunoglobulin coding sequence all or part of the coding sequence for a non-immunoglobulin polypeptide. Such a non-immunoglobulin polypeptide can be substituted for the constant domains of an antibody of the invention, or can be substituted for the variable domains of one antigen-combining site of an antibody of the invention to create a chimeric bivalent antibody.

[0990] The antibodies may be monovalent antibodies. Methods for preparing monovalent antibodies are well known in the art. For example, one method involves recombinant expression of immunoglobulin light chain and modified heavy chain. The heavy chain is truncated generally at any point in the Fe region so as to prevent heavy chain crosslinking. Alternatively, the relevant cysteine residues are substituted with another amino acid residue or are deleted so as to prevent crosslinking.

[0991] In vitro methods are also suitable for preparing monovalent antibodies. Digestion of antibodies to produce fragments thereof, particularly, Fab fragments, can be accomplished using routine techniques known in the art.

### 3. Human and Humanized Antibodies

[0992] The anti-PRO antibodies of the invention may further comprise humanized antibodies or human antibodies. Humanized forms of non-human (e.g., murine) antibodies are chimeric immunoglobulins, immunoglobulin chains or fragments thereof (such as Fv, Fab, Fab′, F(ab′)₂ or other antigen-binding subsequences of antibodies) which contain minimal sequence derived from non-human immunoglobulin. Humanized antibodies include human immunoglobulins (recipient antibody) in which residues from a complementary determining region (CDR) of the recipient are replaced by residues from a CDR of a non-human species (donor antibody) such as mouse, rat or rabbit having the desired specificity, affinity and capacity. In some instances, Fv framework residues of the human immunoglobulin are replaced by corresponding non-human residues. Humanized antibodies may also comprise residues which are found neither in the recipient antibody nor in the imported CDR or framework sequences. In general, the humanized antibody will comprise substantially all of at least one, and typically two, variable domains, in which all or substantially all of the CDR regions correspond to those of a non-human immunoglobulin and all or substantially all of the FR regions are those of a human immunoglobulin consensus sequence. The humanized antibody optimally also will comprise at least a portion of an immunoglobulin constant region (Fc), typically that of a human immunoglobulin [Jones et al., Nature, 321:522-525 (1986); Riechmann et al., Nature, 332:323-329 (1988); and Presta, Curr. Op. Struct. Biol., 2:593-596 (1992)].

[0993] Methods for humanizing non-human antibodies are well known in the art. Generally, a humanized antibody has one or more amino acid residues introduced into it from a source which is non-human. These non-human amino acid residues are often referred to as “import” residues, which are typically taken from an “import” variable domain. Humanization can be essentially performed following the method of Winter and co-workers [Jones et al., Nature, 321:522-525 (1986); Riechmann et al., Nature, 332:323-327 (1988); Verhoeyen et al., Science, 239:1534-1536 (1988)], by substituting rodent CDRs or CDR sequences for the corresponding sequences of a human antibody. Accordingly, such “humanized” antibodies are chimeric antibodies (U.S. Pat. No. 4,816,567), wherein substantially less than an intact human variable domain has been substituted by the corresponding sequence from a non-human species. In practice, humanized antibodies are typically human antibodies in which some CDR residues and possibly some FR residues are substituted by residues from analogous sites in rodent antibodies.

[0994] Human antibodies can also be produced using various techniques known in the art, including phage display libraries [Hoogenboom and Winter, J. Mol. Biol., 227:381 (1991); Marks et al., J. Mol. Biol., 222:581 (1991)]. The techniques of Cole et al. and Boerner et al. are also available for the preparation of human monoclonal antibodies (Cole et al., Monoclonal Antibodies and Cancer Therapy, Alan R. Liss, p. 77 (1985) and Boerner et al., J. Immunol., 147(l):86-95 (1991)]. Similarly, human antibodies can be made by introducing of human immunoglobulin loci into transgenic animals, e.g., mice in which the endogenous immunoglobulin genes have been partially or completely inactivated. Upon challenge, human antibody production is observed, which closely resembles that seen in humans in all respects, including gene rearrangement, assembly, and antibody repertoire. This approach is described, for example, in U.S. Pat. Nos. 5,545,807; 5,545,806; 5,569,825; 5,625,126; 5,633,425; 5,661,016, and in the following scientific publications: Marks et al., Bio/Technology 10, 779-783 (1992); Lonberg et al., Nature 368 856-859 (1994); Morrison, Nature 368, 812-13 (1994); Fishwild et al., Nature Biotechnology 14, 845-51 (1996); Neuberger, Nature Biotechnology 14, 826 (1996); Lonberg and Huszar, Intern. Rev. Immunol. 13 65-93 (1995).

[0995] The antibodies may also be affinity matured using known selection and/or mutagenesis methods as described above. Preferred affinity matured antibodies have an affinity which is five times, more preferably 10 times, even more preferably 20 or 30 times greater than the starting antibody (generally murine, humanized or human) from which the matured antibody is prepared.

### 4. Bispecific Antibodies

[0996] Bispecific antibodies are monoclonal, preferably human or humanized, antibodies that have binding specificities for at least two different antigens. In the present case, one of the binding specificities is for the PRO, the other one is for any other antigen, and preferably for a cell-surface protein or receptor or receptor subunit.

[0997] Methods for making bispecific antibodies are known in the art. Traditionally, the recombinant production of bispecific antibodies is based on the co-expression of two immunoglobulin heavy-chain/light-chain pairs, where the two heavy chains have different specificities [Milstein and Cuello, Nature, 305:537-539 (1983)]. Because of the random assortment of immunoglobulin heavy and light chains, these hybridomas (quadromas) produce a potential mixture of ten different antibody molecules, of which only one has the correct bispecific structure. The purification of the correct molecule is usually accomplished by affinity chromatography steps. Similar procedures are disclosed in WO 93/08829, published 13 May 1993, and in Traunecker et al., EMBO J., 10:3655-3659 (1991).

[0998] Antibody variable domains with the desired binding specificities (antibody-antigen combining sites) can be fused to immunoglobulin constant domain sequences. The fusion preferably is with an immunoglobulin heavy-chain constant domain, comprising at least part of the hinge, CH2, and CH3 regions.

[0999] It is preferred to have the first heavy-chain constant region (CH1) containing the site necessary for light-chain binding present in at least one of the fusions. DNAs encoding the immunoglobulin heavy-chain fusions and, if desired, the immunoglobulin light chain, are inserted into separate expression vectors, and are co-transfected into a suitable host organism. For further details of generating bispecific antibodies see, for example, Suresh et al., Methods in Enzymology, 121:210 (1986).

[1000] According to another approach described in WO 96/27011, the interface between a pair of antibody molecules can be engineered to maximize the percentage of heterodimers which are recovered from recombinant cell culture. The preferred interface comprises at least a part of the CH3 region of an antibody constant domain. In this method, one or more small amino acid side chains from the interface of the first antibody molecule are replaced with larger side chains (e.g. tyrosine or tryptophan). Compensatory “cavities” of identical or similar size to the large side chain(s) are created on the interface of the second antibody molecule by replacing large amino acid side chains with smaller ones (e.g. alanine or threonine). This provides a mechanism for increasing the yield of the heterodiner over other unwanted end-products such as homodimers.

[1001] Bispecific antibodies can be prepared as full length antibodies or antibody fragments (e.g. F(ab′)₂ bispecific antibodies). Techniques for generating bispecific antibodies from antibody fragments have been described in the literature. For example, bispecific antibodies can be prepared can be prepared using chemical linkage. Brennan et al., Science 229:81 (1985) describe a procedure wherein intact antibodies are proteolytically cleaved to generate F(ab′)₂ fragments. These fragments are reduced in the presence of the dithiol complexing agent sodium arsenite to stabilize vicinal dithiols and prevent intermolecular disulfide formation. The Fab′ fragments generated are then converted to thionitrobenzoate (TNB) derivatives. One of the Fab′-TNB derivatives is then reconverted to the Fab′-thiol by reduction with mercaptoethylamine and is mixed with an equimolar amount of the other Fab′-TNB derivative to form the bispecific antibody. The bispecific antibodies produced can be used as agents for the selective immobilization of enzymes.

[1002] Fab′ fragments may be directly recovered from E. coli and chemically coupled to form bispecific antibodies. Shalaby et al., J. Exp. Med. 175:217-225 (1992) describe the production of a fully humanized bispecific antibody F(ab′)₂ molecule. Each Fab′ fragment was separately secreted from E. coli and subjected to directed chemical coupling in vitro to form the bispecific antibody. The bispecific antibody thus formed was able to bind to cells overexpressing the ErbB2 receptor and normal human T cells, as well as trigger the lytic activity of human cytotoxic lymphocytes against human breast tumor targets.

[1003] Various technique for making and isolating bispecific antibody fragments directly from recombinant cell culture have also been described. For example, bispecific antibodies have been produced using leucine zippers. Kostelny et al., J. Immunol. 148(5):1547-1553 (1992). The leucine zipper peptides from the Fos and Jun proteins were linked to the Fab′ portions of two different antibodies by gene fusion. The antibody homodimers were reduced at the hinge region to form monomers and then re-oxidized to form the antibody heterodimers. This method can also be utilized for the production of antibody homodimers. The “diabody” technology described by Hollinger et al., Proc. Natl. Acad. Sci. USA 90:6444-6448 (1993) has provided an alternative mechanism for making bispecific antibody fragments. The fragments comprise a heavy-chain variable domain (V_{H}) connected to a light-chain variable domain (V_{L}) by a linker which is too short to allow pairing between the two domains on the same chain. Accordingly, the V_{H} and V_{L} domains of one fragment are forced to pair with the complementary V_{L} and V_{H} domains of another fragment, thereby forming two antigen-binding sites. Another strategy for making bispecific antibody fragments by the use of single-chain Fv (sFv) dimers has also been reported. See, Gruber et al., J. Immunol. 152:5368 (1994). Antibodies with more than two valencies are contemplated. For example, trispecific antibodies can be prepared. Tutt et al., J. Immunol. 147:60 (1991).

[1004] Exemplary bispecific antibodies may bind to two different epitopes on a given PRO polypeptide herein. Alternatively, an anti-PRO polypeptide arm may be combined with an arm which binds to a triggering molecule on a leukocyte such as a T-cell receptor molecule (e.g. CD2, CD3, CD28, or B7), or Fc receptors for IgG (FcγR), such as FcγRI (CD64), FcγRII (CD32) and FcγRIII (CD16) so as to focus cellular defense mechanisms to the cell expressing the particular PRO polypeptide. Bispecific antibodies may also be used to localize cytotoxic agents to cells which express a particular PRO polypeptide. These antibodies possess a PRO-binding arm and an arm which binds a cytotoxic agent or a radionuclide chelator, such as EOTUBE, DPTA, DOTA, or TETA. Another bispecific antibody of interest binds the PRO polypeptide and further binds tissue factor (TF).

### 5. Heteroconjugate Antibodies

[1005] Heteroconjugate antibodies are also within the scope of the present invention. Heteroconjugate antibodies are composed of two covalently joined antibodies. Such antibodies have, for example, been proposed to target immune system cells to unwanted cells [U.S. Pat. No. 4,676,980], and for treatment of HIV infection [WO 91/00360; WO 92/200373; EP 030891. It is contemplated that the antibodies may be prepared in vitro using known methods in synthetic protein chemistry, including those involving crosslinking agents. For example, immunotoxins may be constructed using a disulfide exchange reaction or by forming a thioether bond. Examples of suitable reagents for this purpose include iminothiolate and methyl-4-mercaptobutyrimidate and those disclosed, for example, in U.S. Pat. No. 4,676,980.

### 6. Effector Function Engineering

[1006] It may be desirable to modify the antibody of the invention with respect to effector function, so as to enhance, e.g., the effectiveness of the antibody in treating cancer. For example, cysteine residue(s) may be introduced into the Fc region, thereby allowing interchain disulfide bond formation in this region. The homodimeric antibody thus generated may have improved internalization capability and/or increased complement-mediated cell killing and antibody-dependent cellular cytotoxicity (ADCC). See Caron et al., J. Exp Med., 176: 1191-1195 (1992) and Shopes, J. Immunol., 148: 2918-2922 (1992). Homodimeric antibodies with enhanced anti-tumor activity may also be prepared using heterobifunctional cross-linkers as described in Wolff et al. Cancer Research, 53: 2560-2565 (1993). Alternatively, an antibody can be engineered that has dual Fc regions and may thereby have enhanced complement lysis and ADCC capabilities. See Stevenson et al., Anti-Cancer Drug Design, 3: 219-230 (1989).

### 7. Immunoconjugates

[1007] The invention also pertains to immunoconjugates comprising an antibody conjugated to a cytotoxic agent such as a chemotherapeutic agent, toxin (e.g., an enzymatically active toxin of bacterial, fungal, plant, or animal origin, or fragments thereof), or a radioactive isotope (i.e., a radioconjugate).

[1008] Chemotherapeutic agents useful in the generation of such immunoconjugates have been described above. Enzymatically active toxins and fragments thereof that can be used include diphtheria A chain, nonbinding active fragments of diphtheria toxin, exotoxin A chain (from Pseudomonas aeruginosa), ricin A chain, abrin A chain, modeccin A chain, alpha-sarcin, Aleurites fordii proteins, dianthin proteins, Phytolaca americana proteins (PAPI, PAPII, and PAP-S), momordica charantia inhibitor, curcin, crotin, sapaonaria officinalis inhibitor, gelonin, mitogellin, restrictocin, phenomycin, enomycin, and the tricothecenes. A variety of radionuclides are available for the production of radioconjugated antibodies. Examples include ²¹²Bi, ¹³¹I, ¹³¹In, ⁹⁰Y, and ¹⁸⁶Re.

[1009] Conjugates of the antibody and cytotoxic agent are made using a variety of bifunctional protein-coupling agents such as N-succinimidyl-3-(2-pyridyldithiol) propionate (SPDP), iminothiolane (IT), bifunctional derivatives of imidoesters (such as dimethyl adipimidate HCL), active esters (such as disuccinimidyl suberate), aldehydes (such as glutareldehyde), bis-azido compounds (such as bis (p-azidobenzoyl)hexanediamine), bis-diazonium derivatives (such as bis-(p-diazoniumbenzoyl)-ethylenediamine), diisocyanates (such as tolyene 2,6-diisocyanate), and bis-active fluorine compounds (such as 1,5-difluoro-2,4-dinitrobenzene). For example, a ricin immunotoxin can be prepared as described in Vitetta et al., Science, 238: 1098 (1987). Carbon-14-labeled 1-isothiocyanatobenzyl-3-methyldiethylene triaminepentaacetic acid (MX-DTPA) is an exemplary chelating agent for conjugation of radionueleotide to the antibody. See WO94/11026.

[1010] In another embodiment, the antibody may be conjugated to a “receptor” (such streptavidin) for utilization in tumor pretargeting wherein the antibody-receptor conjugate is administered to the patient, followed by removal of unbound conjugate from the circulation using a clearing agent and then administration of a “ligand” (e.g., avidin) that is conjugated to a cytotoxic agent (e.g., a radionucleotide).

### 8. Immunoliposomes

[1011] The antibodies disclosed herein may also be formulated as immunoliposomes. Liposomes containing the antibody are prepared by methods known in the art, such as described in Epstein et al., Proc. Natl. Acad. Sci. USA, 82: 3688 (1985); Hwang et al., Proc. Natl. Acad. Sci. USA, 77: 4030 (1980); and U.S. Pat. Nos. 4,485,045 and 4,544,545. Liposomes with enhanced circulation time are disclosed in U.S. Pat. No. 5,013,556.

[1012] Particularly useful liposomes can be generated by the reverse-phase evaporation method with a lipid composition comprising phosphatidylcholine, cholesterol, and PEG-derivatized phosphatidylethanolamine (PEG-PE). Liposomes are extruded through filters of defined pore size to yield liposomes with the desired diameter. Fab′ fragments of the antibody of the present invention can be conjugated to the liposomes as described in Martin et al., J. Biol. Chem., 257: 286-288 (1982) via a disulfide-interchange reaction. A chemotherapeutic agent (such as Doxorubicin) is optionally contained within the liposome. See Gabizon et al., J. National Cancer Inst., 81(19): 1484 (1989).

[1013] M. Pharmaceutical Compositions

[1014] The active PRO molecules of the invention (e.g., PRO polypeptides, anti-PRO antibodies, and/or variants of each) as well as other molecules identified by the screening assays disclosed above, can be administered for the treatment of immune related diseases, in the form of pharmaceutical compositions.

[1015] Therapeutic formulations of the active PRO molecule, preferably a polypeptide or antibody of the invention, are prepared for storage by mixing the active molecule having the desired degree of purity with optional pharmaceutically acceptable carriers, excipients or stabilizers (Remington's Pharmaceutical Sciences 16th edition, Osol, A. Ed. [1980]), in the form of lyophilized formulations or aqueous solutions. Acceptable carriers, excipients, or stabilizers are nontoxic to recipients at the dosages and concentrations employed, and include buffers such as phosphate, citrate, and other organic acids; antioxidants including ascorbic acid and methionine; preservatives (such as octadecyidimethylbenzyl ammonium chloride; hexamethonium chloride; benzalkonium chloride, benzethonium chloride; phenol, butyl or benzyl alcohol; alkyl parabens such as methyl or propyl paraben; catechol; resorcinol; cyclohexanol; 3-pentanol; and m-cresol); low molecular weight (less than about 10 residues) polypeptides; proteins, such as serum albumin, gelatin, or immunoglobulins; hydrophilic polymers such as polyvinylpyrrolidone; amino acids such as glycine, glutamine, asparagine, histidine, arginine, or lysine; monosaccharides, disaccharides, and other carbohydrates including glucose, mannose, or dextrins; chelating agents such as EDTA; sugars such as sucrose, mannitol, trehalose or sorbitol; salt-forming counter-ions such as sodium; metal complexes (e.g., Zn-protein complexes); and/or non-ionic surfactants such as TWEEN™, PLURONICS™ or polyethylene glycol (PEG).

[1016] Compounds identified by the screening assays disclosed herein can be formulated in an analogous manner, using standard techniques well known in the art.

[1017] Lipofections or liposomes can also be used to deliver the PRO molecule into cells. Where antibody fragments are used, the smallest inhibitory fragment which specifically binds to the binding domain of the target protein is preferred. For example, based upon the variable region sequences of an antibody, peptide molecules can be designed which retain the ability to bind the target protein sequence. Such peptides can be synthesized chemically and/or produced by recombinant DNA technology (see, e.g., Marasco et al., Proc. Natl. Acad. Sci. USA 90, 7889-7893 [1993]).

[1018] The formulation herein may also contain more than one active compound as necessary for the particular indication being treated, preferably those with complementary activities that do not adversely affect each other. Alternatively, or in addition, the composition may comprise a cytotoxic agent, cytokine or growth inhibitory agent. Such molecules are suitably present in combination in amounts that are effective for the purpose intended.

[1019] The active PRO molecules may also be entrapped in microcapsules prepared, for example, by coacervation techniques or by interfacial polymerization, for example, hydroxymethylcellulose or gelatin-microcapsules and poly-(methylmethacylate) microcapsules, respectively, in colloidal drug delivery systems (for example, liposomes, albumin microspheres, microemulsions, nano-particles and nanocapsules) or in macroemulsions. Such techniques are disclosed in Remington's Pharmaceutical Sciences 16th edition, Osol, A. Ed. (1980).

[1020] The formulations to be used for in vivo administration must be sterile. This is readily accomplished by filtration through sterile filtration membranes.

[1021] Sustained-release preparations or the PRO molecules may be prepared. Suitable examples of sustained-release preparations include semipermeable matrices of solid hydrophobic polymers containing the antibody, which matrices are in the form of shaped articles, e.g., films, or microcapsules. Examples of sustained-release matrices include polyesters, hydrogels (for example, poly(2-hydroxyethyl-methacrylate), or poly(vinylalcohol)), polylactides (U.S. Pat. No. 3,773,919), copolymers of L-glutamic acid and γ-ethyl-L-glutamate, glutamate, non-degradable ethylene-vinyl acetate, degradable lactic acid-glycolic acid copolymers such as the LUPRON DEPOT™ (injectable microspheres composed of lactic acid-glycolic acid copolymer and leuprolide acetate), and poly-D-(−)-3-hydroxybutyric acid. While polymers such as ethylene-vinyl acetate and lactic acid-glycolic acid enable release of molecules for over 100 days, certain hydrogels release proteins for shorter time periods. When encapsulated antibodies remain in the body for a long time, they may denature or aggregate as a result of exposure to moisture at 37° C., resulting in a loss of biological activity and possible changes in immunogenicity. Rational strategies can be devised for stabilization depending on the mechanism involved. For example, if the aggregation mechanism is discovered to be intermolecular S—S bond formation through thio-disulfide interchange, stabilization may be achieved by modifying sulfhydryl residues, lyophilizing from acidic solutions, controlling moisture content, using appropriate additives, and developing specific polymer matrix compositions.

[1022] N. Methods of Treatment

[1023] It is contemplated that the polypeptides, antibodies and other active compounds of the present invention may be used to treat various immune related diseases and conditions, such as T cell mediated diseases, including those characterized by infiltration of inflammatory cells into a tissue, stimulation of T-cell proliferation, inhibition of T-cell proliferation, increased or decreased vascular permeability or the inhibition thereof.

[1024] Exemplary conditions or disorders to be treated with the polypeptides, antibodies and other compounds of the invention, include, but are not limited to systemic lupus erythematosis, rheumatoid arthritis, juvenile chronic arthritis, osteoarthritis, spondyloarthropathies, systemic sclerosis (scleroderma), idiopathic inflammatory myopathies (dermatomyositis, polymyositis), Sjögren's syndrome, systemic vasculitis, sarcoidosis, autoimmune hemolytic anemia (immune pancytopenia, paroxysmal nocturnal hemoglobinuria), autoimmune thrombocytopenia (idiopathic thrombocytopenic purpura, immune-mediated thrombocytopenia), thyroiditis (Grave's disease, Hashimoto's thyroiditis, juvenile lymphocytic thyroiditis, atrophic thyroiditis), diabetes mellitus, immune-mediated renal disease (glomerulonephritis, tubulointerstitial nephritis), demyelinating diseases of the central and peripheral nervous systems such as multiple sclerosis, idiopathic demyelinating polyneuropathy or Guillain-Barré syndrome, and chronic inflammatory demyelinating polyneuropathy, hepatobiliary diseases such as infectious hepatitis (hepatitis A, B, C, D, E and other non-hepatotropic viruses), autoimmune chronic active hepatitis, primary biliary cirrhosis, granulomatous hepatitis, and sclerosing cholangitis, inflammatory bowel disease (ulcerative colitis: Crohn's disease), gluten-sensitive enteropathy, and Whipple's disease, autoimmune or immune-mediated skin diseases including bullous skin diseases, erythema multiforme and contact dermatitis, psoriasis, allergic diseases such as asthma, allergic rhinitis, atopic dermatitis, food hypersensitivity and urticaria, immunologic diseases of the lung such as eosinophilic pneumonias, idiopathic pulmonary fibrosis and hypersensitivity pneumonitis, transplantation associated diseases including graft rejection and graft -versus-host-disease.

[1025] In systemic lupus erythematosus, the central mediator of disease is the production of auto-reactive antibodies to self proteins/tissues and the subsequent generation of immune-mediated inflammation. Antibodies either directly or indirectly mediate tissue injury. Though T lymphocytes have not been shown to be directly involved in tissue damage, T lymphocytes are required for the development of auto-reactive antibodies. The genesis of the disease is thus T lymphocyte dependent. Multiple organs and systems are affected clinically including kidney, lung, musculoskeletal system, mucocutaneous, eye, central nervous system, cardiovascular system, gastrointestinal tract, bone marrow and blood.

[1026] Rheumatoid arthritis (RA) is a chronic systemic autoimmune inflammatory disease that mainly involves the synovial membrane of multiple joints with resultant injury to the articular cartilage. The pathogenesis is T lymphocyte dependent and is associated with the production of rheumatoid factors, auto-antibodies directed against self IgG, with the resultant formation of immune complexes that attain high levels in joint fluid and blood. These complexes in the joint may induce the marked infiltrate of lymphocytes and monocytes into the synovium and subsequent marked synovial changes; the joint space/fluid if infiltrated by similar cells with the addition of numerous neutrophils. Tissues affected are primarily the joints, often in symmetrical pattern. However, extra-articular disease also occurs in two major forms. One form is the development of extra-articular lesions with ongoing progressive joint disease and typical lesions of pulmonary fibrosis, vasculitis, and cutaneous ulcers. The second form of extra-articular disease is the so called Felty's syndrome which occurs late in the RA disease course, sometimes after joint disease has become quiescent, and involves the presence of neutropenia, thrombocytopenia and splenomegaly. This can be accompanied by vasculitis in multiple organs with formations of infarcts, skin ulcers and gangrene. Patients often also develop rheumatoid nodules in the subcutis tissue overlying affected joints; the nodules late stage have necrotic centers surrounded by a mixed inflammatory cell infiltrate. Other manifestations which can occur in RA include: pericarditis, pleuritis, coronary arteritis, intestitial pneumonitis with pulmonary fibrosis, keratoconjunctivitis sicca, and rhematoid nodules.

[1027] Juvenile chronic arthritis is a chronic idiopathic inflammatory disease which begins often at less than 16 years of age. Its phenotype has some similarities to RA; some patients which are rhematoid factor positive are classified as juvenile rheumatoid arthritis. The disease is sub-classified into three major categories: pauciarticular, polyarticular, and systemic. The arthritis can be severe and is typically destructive and leads to joint ankylosis and retarded growth. Other manifestations can include chronic anterior uveitis and systemic amyloidosis.

[1028] Spondyloarthropathies are a group of disorders with some common clinical features and the common association with the expression of HLA-B27 gene product. The disorders include: ankylosing sponylitis, Reiter's syndrome (reactive arthritis), arthritis associated with inflammatory bowel disease, spondylitis associated with psoriasis, juvenile onset spondyloarthropathy and undifferentiated spondyloarthropathy. Distinguishing features include sacroileitis with or without spondylitis; inflammatory asymmetric arthritis; association with HLA-B27 (a serologically defined allele of the HLA-B locus of class I MHC); ocular inflammation, and absence of autoantibodies associated with other rheumatoid disease. The cell most implicated as key to induction of the disease is the CD8+ T lymphocyte, a cell which targets antigen presented by class I MHC molecules. CD8+T cells may react against the class I MHC allele HLA-B27 as if it were a foreign peptide expressed by MHC class I molecules. It has been hypothesized that an epitope of HLA-B27 may mimic a bacterial or other microbial antigenic epitope and thus induce a CD8+ T cells response.

[1029] Systemic sclerosis (scleroderma) has an unknown etiology. A hallmark of the disease is induration of the skin; likely this is induced by an active inflammatory process. Scleroderma can be localized or systemic; vascular lesions are common and endothelial cell injury in the microvasculature is an early and important event in the development of systemic sclerosis; the vascular injury may be immune mediated. An immunologic basis is implied by the presence of mononuclear cell infiltrates in the cutaneous lesions and the presence of anti-nuclear antibodies in many patients. ICAM-1 is often upregulated on the cell surface of fibroblasts in skin lesions suggesting that T cell interaction with these cells may have a role in the pathogenesis of the disease. Other organs involved include: the gastrointestinal tract: smooth muscle atrophy and fibrosis resulting in abnormal peristalsis/motility; kidney: concentric subendothelial intimal proliferation affecting small arcuate and interlobular arteries with resultant reduced renal cortical blood flow, results in proteinuria, azotemia and hypertension; skeletal muscle: atrophy, interstitial fibrosis; inflammation; lung: interstitial pneumonitis and interstitial fibrosis; and heart: contraction band necrosis, scarring/fibrosis.

[1030] Idiopathic inflammatory myopathies including dermatomyositis, polymyositis and others are disorders of chronic muscle inflammation of unknown etiology resulting in muscle weakness. Muscle injury/inflammation is often symmetric and progressive. Autoantibodies are associated with most forms. These myositis-specific autoantibodies are directed against and inhibit the function of components, proteins and RNA's, involved in protein synthesis.

[1031] Sjögren's syndrome is due to immune-mediated inflammation and subsequent functional destruction of the tear glands and salivary glands. The disease can be associated with or accompanied by inflammatory connective tissue diseases. The disease is associated with autoantibody production against Ro and La antigens, both of which are small RNA-protein complexes. Lesions result in keratoconjunctivitis sicca, xerostomia, with other manifestations or associations including bilary cirrhosis, peripheral or sensory neuropathy, and palpable purpura.

[1032] Systemic vasculitis are diseases in which the primary lesion is inflammation and subsequent damage to blood vessels which results in ischemia/necrosis/degeneration to tissues supplied by the affected vessels and eventual end-organ dysfunction in some cases. Vasculitides can also occur as a secondary lesion or sequelae to other immune-inflammatory mediated diseases such as rheumatoid arthritis, systemic sclerosis, etc., particularly in diseases also associated with the formation of immune complexes. Diseases in the primary systemic vasculitis group include: systemic necrotizing vasculitis: polyarteritis nodosa, allergic angiitis and granulomatosis, polyangiitis; Wegener's granulomatosis; lymphomatoid granulomatosis; and giant cell arteritis. Miscellaneous vasculitides include: mucocutaneous lymph node syndrome (MLNS or Kawasaki's disease), isolated CNS vasculitis, Behet's disease, thromboangiitis obliterans (Buerger's disease) and cutaneous necrotizing venulitis. The pathogenic mechanism of most of the types of vasculitis listed is believed to be primarily due to the deposition of immunoglobulin complexes in the vessel wall and subsequent induction of an inflammatory response either via ADCC, complement activation, or both.

[1033] Sarcoidosis is a condition of unknown etiology which is characterized by the presence of epithelioid granulomas in nearly any tissue in the body; involvement of the lung is most common. The pathogenesis involves the persistence of activated macrophages and lymphoid cells at sites of the disease with subsequent chronic sequelae resultant from the release of locally and systemically active products released by these cell types.

[1034] Autoimmune hemolytic anemia including autoimmune hemolytic anemia, immune pancytopenia, and paroxysmal noctural hemoglobinuria is a result of production of antibodies that react with antigens expressed on the surface of red blood cells (and in some cases other blood cells including platelets as well) and is a reflection of the removal of those antibody coated cells via complement mediated lysis and/or ADCC/Fc-receptor-mediated mechanisms.

[1035] In autoimmune thrombocytopenia including thrombocytopenic purpura, and immune-mediated thrombocytopenia in other clinical settings, platelet destruction/removal occurs as a result of either antibody or complement attaching to platelets and subsequent removal by complement lysis, ADCC or FC-receptor mediated mechanisms.

[1036] Thyroiditis including Grave's disease, Hashimoto's thyroiditis, juvenile lymphocytic thyroiditis, and atrophic thyroiditis, are the result of an autoimmune response against thyroid antigens with production of antibodies that react with proteins present in and often specific for the thyroid gland. Experimental models exist including spontaneous models: rats (BUF and BB rats) and chickens (obese chicken strain); inducible models: immunization of animals with either thyroglobulin, thyroid microsomal antigen (thyroid peroxidase).

[1037] Type I diabetes mellitus or insulin-dependent diabetes is the autoimmune destruction of pancreatic islet β cells; this destruction is mediated by auto-antibodies and auto-reactive T cells. Antibodies to insulin or the insulin receptor can also produce the phenotype of insulin-non-responsiveness.

[1038] Immune mediated renal diseases, including glomerulonephritis and tubulointerstitial nephritis, are the result of antibody or T lymphocyte mediated injury to renal tissue either directly as a result of the production of autoreactive antibodies or T cells against renal antigens or indirectly as a result of the deposition of antibodies and/or immune complexes in the kidney that are reactive against other, non-renal antigens. Thus other immune-mediated diseases that result in the formation of immune-complexes can also induce immune mediated renal disease as an indirect sequelae. Both direct and indirect immune mechanisms result in inflammatory response that produces/induces lesion development in renal tissues with resultant organ function impairment and in some cases progression to renal failure. Both humoral and cellular immune mechanisms can be involved in the pathogenesis of lesions.

[1039] Demyelinating diseases of the central and peripheral nervous systems, including Multiple Sclerosis; idiopathic demyelinating polyneuropathy or Guillain-Barré syndrome; and Chronic Inflammatory Demyelinating Polyneuropathy, are believed to have an autoimmune basis and result in nerve demyelination as a result of damage caused to oligodendrocytes or to myelin directly. In MS there is evidence to suggest that disease induction and progression is dependent on T lymphocytes. Multiple Sclerosis is a demyelinating disease that is T lymphocyte-dependent and has either a relapsing-remitting course or a chronic progressive course. The etiology is unknown; however, viral infections, genetic predisposition, environment, and autoimmunity all contribute. Lesions contain infiltrates of predominantly T lymphocyte mediated, microglial cells and infiltrating macrophages; CD4+ T lymphocytes are the predominant cell type at lesions. The mechanism of oligodendrocyte cell death and subsequent demyelination is not known but is likely T lymphocyte driven.

[1040] Inflammatory and Fibrotic Lung Disease, including Eosinophilic Pneumonias; Idiopathic Pulmonary Fibrosis, and Hypersensitivity Pneumonitis may involve a disregulated immune-inflammatory response. Inhibition of that response would be of therapeutic benefit.

[1041] Autoimmune or Immune-mediated Skin Disease including Bullous Skin Diseases, Erythema Multiforme, and Contact Dermatitis are mediated by auto-antibodies, the genesis of which is T lymphocyte-dependent.

[1042] Psoriasis is a T lymphocyte-mediated inflammatory disease. Lesions contain infiltrates of T lymphocytes, macrophages and antigen processing cells, and some neutrophils.

[1043] Allergic diseases, including asthma; allergic rhinitis; atopic dermatitis; food hypersensitivity; and urticaria are T lymphocyte dependent. These diseases are predominantly mediated by T lymphocyte induced inflammation, IgE mediated-inflammation or a combination of both.

[1044] Transplantation associated diseases, including Graft rejection and Graft-Versus-Host-Disease (GVHD) are T lymphocyte-dependent; inhibition of T lymphocyte function is ameliorative. Other diseases in which intervention of the immune and/or inflammatory response have benefit are infectious disease including but not limited to viral infection (including but not limited to AIDS, hepatitis A, B, C, D, E and herpes) bacterial infection, fungal infections, and protozoal and parasitic infections (molecules (or derivatives/agonists) which stimulate the MLR can be utilized therapeutically to enhance the immune response to infectious agents), diseases of immunodeficiency (molecules/derivatives/agonists) which stimulate the MLR can be utilized therapeutically to enhance the immune response for conditions of inherited, acquired, infectious induced (as in HIV infection), or iatrogenic (i.e., as from chemotherapy) immunodeficiency, and neoplasia.

[1045] It has been demonstrated that some human cancer patients develop an antibody and/or T lymphocyte response to antigens on neoplastic cells. It has also been shown in animal models of neoplasia that enhancement of the immune response can result in rejection or regression of that particular neoplasm. Molecules that enhance the T lymphocyte response in the MLR have utility in vivo in enhancing the immune response against neoplasia. Molecules which enhance the T lymphocyte proliferative response in the MLR (or small molecule agonists or antibodies that affected the same receptor in an agonistic fashion) can be used therapeutically to treat cancer. Molecules that inhibit the lymphocyte response in the MLR also function in vivo during neoplasia to suppress the immune response to a neoplasm; such molecules can either be expressed by the neoplastic cells themselves or their expression can be induced by the neoplasm in other cells. Antagonism of such inhibitory molecules (either with antibody, small molecule antagonists or other means) enhances immune-mediated tumor rejection.

[1046] Additionally, inhibition of molecules with proinflammatory properties may have therapeutic benefit in reperfusion injury; stroke; myocardial infarction; atherosclerosis; acute lung injury; hemorrhagic shock; burn; sepsis/septic shock; acute tubular necrosis; endometriosis; degenerative joint disease and pancreatis.

[1047] The compounds of the present invention, e.g., polypeptides or antibodies, are administered to a mammal, preferably a human, in accord with known methods, such as intravenous administration as a bolus or by continuous infusion over a period of time, by intramuscular, intraperitoneal, intracerobrospinal, subcutaneous, intra-articular, intrasynovial, intrathecal, oral, topical, or inhalation (intranasal, intrapulmonary) routes. Intravenous or inhaled administration of polypeptides and antibodies is preferred.

[1048] In immunoadjuvant therapy, other therapeutic regimens, such administration of an anti-cancer agent, may be combined with the administration of the proteins, antibodies or compounds of the instant invention. For example, the patient to be treated with a the immunoadjuvant of the invention may also receive an anti-cancer agent (chemotherapeutic agent) or radiation therapy. Preparation and dosing schedules for such chemotherapeutic agents may be used according to manufacturers' instructions or as determined empirically by the skilled practitioner. Preparation and dosing schedules for such chemotherapy are also described in Chemotherapy Service Ed., M. C. Perry, Williams & Wilkins, Baltimore, Md. (1992). The chemotherapeutic agent may precede, or follow administration of the immunoadjuvant or may be given simultaneously therewith. Additionally, an anti-estrogen compound such as tamoxifen or an anti-progesterone such as onapristone (see, EP 616812) may be given in dosages known for such molecules.

[1049] It may be desirable to also administer antibodies against other immune disease associated or tumor associated antigens, such as antibodies which bind to CD20, CD11a, CD18, ErbB2, EGFR, ErbB3, ErbB4, or vascular endothelial factor (VEGF). Alternatively, or in addition, two or more antibodies binding the same or two or more different antigens disclosed herein may be coadministered to the patient. Sometimes, it may be beneficial to also administer one or more cytokines to the patient. In one embodiment, the PRO polypeptides are coadministered with a growth inhibitory agent. For example, the growth inhibitory agent may be administered first, followed by a PRO polypeptide. However, simultaneous administration or administration first is also contemplated. Suitable dosages for the growth inhibitory agent are those presently used and may be lowered due to the combined action (synergy) of the growth inhibitory agent and the PRO polypeptide.

[1050] For the treatment or reduction in the severity of immune related disease, the appropriate dosage of an a compound of the invention will depend on the type of disease to be treated, as defined above, the severity and course of the disease, whether the agent is administered for preventive or therapeutic purposes, previous therapy, the patient's clinical history and response to the compound, and the discretion of the attending physician. The compound is suitably administered to the patient at one time or over a series of treatments.

[1051] For example, depending on the type and severity of the disease, about 1 μg/kg to 15 mg/kg (e.g., 0.1-20 mg/kg) of polypeptide or antibody is an initial candidate dosage for administration to the patient, whether, for example, by one or more separate administrations, or by continuous infusion. A typical daily dosage might range from about 1 μg/kg to 100 mg/kg or more, depending on the factors mentioned above. For repeated administrations over several days or longer, depending on the condition, the treatment is sustained until a desired suppression of disease symptoms occurs. However, other dosage regimens may be useful. The progress of this therapy is easily monitored by conventional techniques and assays.

[1052] O. Articles of Manufacture

[1053] In another embodiment of the invention, an article of manufacture containing materials (e.g., comprising a PRO molecule) useful for the diagnosis or treatment of the disorders described above is provided. The article of manufacture comprises a container and an instruction. Suitable containers include, for example, bottles, vials, syringes, and test tubes. The containers may be formed from a variety of materials such as glass or plastic. The container holds a composition which is effective for diagnosing or treating the condition and may have a sterile access port (for example the container may be an intravenous solution bag or a vial having a stopper pierceable by a hypodermic injection needle). The active agent in the composition is usually a polypeptide or an antibody of the invention. An instruction or label on, or associated with, the container indicates that the composition is used for diagnosing or treating the condition of choice. The article of manufacture may further comprise a second container comprising a pharmaceutically-acceptable buffer, such as phosphate-buffered saline, Ringer's solution and dextrose solution. It may further include other materials desirable from a commercial and user standpoint, including other buffers, diluents, filters, needles, syringes, and package inserts with instructions for use.

[1054] P. Diagnosis and Prognosis of Immune Related Disease

[1055] Cell surface proteins, such as proteins which are overexpressed in certain immune related diseases, are excellent targets for drug candidates or disease treatment. The same proteins along with secreted proteins encoded by the genes amplified in immune related disease states find additional use in the diagnosis and prognosis of these diseases. For example, antibodies directed against the protein products of genes amplified in multiple sclerosis, rheumatoid arthritis, or another immune related disease, can be used as diagnostics or prognostics.

[1056] For example, antibodies, including antibody fragments, can be used to qualitatively or quantitatively detect the expression of proteins encoded by amplified or overexpressed genes (“marker gene products”). The antibody preferably is equipped with a detectable, e.g., fluorescent label, and binding can be monitored by light microscopy, flow cytometry, fluorimetry, or other techniques known in the art. These techniques are particularly suitable, if the overexpressed gene encodes a cell surface protein Such binding assays are performed essentially as described above.

[1057] In situ detection of antibody binding to the marker gene products can be performed, for example, by immunofluorescence or immunoelectron microscopy. For this purpose, a histological specimen is removed from the patient, and a labeled antibody is applied to it, preferably by overlaying the antibody on a biological sample. This procedure also allows for determining the distribution of the marker gene product in the tissue examined. It will be apparent for those skilled in the art that a wide variety of histological methods are readily available for in situ detection.

[1058] The following examples are offered for illustrative purposes only, and are not intended to limit the scope of the present invention in any way.

[1059] All patent and literature references cited in the present specification are hereby incorporated by reference in their entirety.

### EXAMPLES

[1060] Commercially available reagents referred to in the examples were used according to manufacturer's instructions unless otherwise indicated. The source of those cells identified in the following examples, and throughout the specification, by ATCC accession numbers is the American Type Culture Collection, Manassas, Va.

### Example 1

### Microarray Analysis of Stimulated T-cells

[1061] Nucleic acid microarrays, often containing thousands of gene sequences, are useful for identifying differentially expressed genes in diseased tissues as compared to their normal counterparts. Using nucleic acid microarrays, test and control mRNA samples from test and control tissue samples are reverse transcribed and labeled to generate cDNA probes. The cDNA probes are then hybridized to an array of nucleic acids immobilized on a solid support. The array is configured such that the sequence and position of each member of the array is known. For example, a selection of genes known to be expressed in certain disease states may be arrayed on a solid support. Hybridization of a labeled probe with a particular array member indicates that the sample from which the probe was derived expresses that gene. If the hybridization signal of a probe from a test (in this instance, activated CD4+ T cells) sample is greater than hybridization signal of a probe from a control (in this instance, non-stimulated CD4 + T cells) sample, the gene or genes overexpressed in the test tissue are identified. The implication of this result is that an overexpressed protein in a test tissue is useful not only as a diagnostic marker for the presence of the disease condition, but also as a therapeutic target for treatment of the disease condition.

[1062] The methodology of hybridization of nucleic acids and microarray technology is well known in the art. In one example, the specific preparation of nucleic acids for hybridization and probes, slides, and hybridization conditions are all detailed in PCT Patent Application Serial No. PCT/US01/10482, filed on Mar. 30, 2001 and which is herein incorporated by reference.

[1063] In this experiment, CD4+ T cells were purified from a single donor using the RossetteSep™ protocol from (Stem Cell Technologies, Vancouver BC) which contains anti-CD8, anti-CD16, anti-CD19, anti-CD36 and anti-CD56 antibodies used to produce a population of isolated CD4 +T cells. Isolated CD4+ T cells were activated with an anti-CD3 antibody (used at a concentration that does not stimulate proliferation) together with either ICAM-1, anti-CD28 antibody or a combination of both ICAM-1, anti-CD28. At 24 or 72 hours cells were harvested, RNA extracted and analysis run on Affimax (Affymetrix Inc. Santa Clara, Calif.) U95A chips. Non-stimulated (resting) cells were harvested immediately after purification, and subjected to the same analysis. Genes were compared whose expression was upregulated at either of the two timepoints in activated vs. resting cells. These genes were also compared to a panel of normal tissues. A normal “universal” tissue control sample was prepared by pooling non-cancerous, human tissues including liver, kidney, and lung. Microarray hybridization experiments using the universal control samples generated a linear plot in a 2-color analysis. The slope of the line generated in a 2-color analysis was then used to normalize the ratios of (test:control detection) within each experiment. The normalized ratios from various experiments were then compared and used to identify clustering of gene expression. Thus, the universal control sample not only allowed effective relative gene expression determinations in a simple 2-sample comparison, it also allowed multi-sample comparisons across several experiments.

[1064] Below are the results of these experiments, demonstrating that various PRO polypeptides of the present invention are significantly overexpressed in isolated CD4 + T cells activated by ICAM-1, anti-CD 28, or a combination of ICAM-1/anti-CD28 as compared to isolated resting CD4+ T cells. As described above, these data demonstrate that the PRO polypeptides of the present invention are useful not only as diagnostic markers for the presence of one or more immune disorders, but also serve as therapeutic targets for the treatment of those immune disorders.

[1065] FIGS. 1-280 are the PRO polypeptides increased by ICAM-1/anti-CD28.

[1066] FIGS. 281-496 are the PRO polypeptides increased by ICAM-1.

[1067] FIGS. 497-742 are the PRO polypeptides increased by anti-CD28.

### Example 2

### Use of PRO as a Hybridization Probe

[1068] The following method describes use of a nucleotide sequence encoding PRO as a hybridization probe.

[1069] DNA comprising the coding sequence of full-length or mature PRO as disclosed herein is employed as a probe to screen for homologous DNAs (such as those encoding naturally-occurring variants of PRO) in human tissue cDNA libraries or human tissue genomic libraries.

[1070] Hybridization and washing of filters containing either library DNAs is performed under the following high stringency conditions. Hybridization of radiolabeled PRO-derived probe to the filters is performed in a solution of 50% formamide, 5×SSC, 0.1% SDS, 0. I % sodium pyrophosphate, 50 mM sodium phosphate, pH 6.8, 2× Denhardt's solution, and 10% dextran sulfate at 42° C. for 20 hours. Washing of the filters is performed in an aqueous solution of 0.1×SSC and 0.1% SDS at 42° C.

[1071] DNAs having a desired sequence identity with the DNA encoding full-length native sequence PRO can then be identified using standard techniques known in the art.

### Example 3

### Expression of PRO in E. coli

[1072] This example illustrates preparation of an unglycosylated form of PRO by recombinant expression in E. coli.

[1073] The DNA sequence encoding PRO is initially amplified using selected PCR primers. The primers should contain restriction enzyme sites which correspond to the restriction enzyme sites on the selected expression vector. A variety of expression vectors may be employed. An example of a suitable vector is pBR322 (derived from E. coli; see Bolivar et al., Gene, 2:95 (1977)) which contains genes for ampicillin and tetracycline resistance. The vector is digested with restriction enzyme and dephosphorylated. The PCR amplified sequences are then ligated into the vector. The vector will preferably include sequences which encode for an antibiotic resistance gene, a trp promoter, a polyhis leader (including the first six STII codons, polyhis sequence, and enterokinase cleavage site), the PRO coding region, lambda transcriptional terminator, and an argU gene.

[1074] The ligation mixture is then used to transform a selected E. coli strain using the methods described in Sambrook et al., supra. Transformants are identified by their ability to grow on LB plates and antibiotic resistant colonies are then selected. Plasmid DNA can be isolated and confirmed by restriction analysis and DNA sequencing.

[1075] Selected clones can be grown overnight in liquid culture medium such as LB broth supplemented with antibiotics. The overnight culture may subsequently be used to inoculate a larger scale culture. The cells are then grown to a desired optical density, during which the expression promoter is turned on.

[1076] After culturing the cells for several more hours, the cells can be harvested by centrifugation. The cell pellet obtained by the centrifugation can be solubilized using various agents known in the art, and the solubilized PRO protein can then be purified using a metal chelating column under conditions that allow tight binding of the protein.

[1077] PRO may be expressed in E. coli in a poly-His tagged form, using the following procedure. The DNA encoding PRO is initially amplified using selected PCR primers. The primers will contain restriction enzyme sites which correspond to the restriction enzyme sites on the selected expression vector, and other useful sequences providing for efficient and reliable translation initiation, rapid purification on a metal chelation column, and proteolytic removal with enterokinase. The PCR-amplified, poly-His tagged sequences are then ligated into an expression vector, which is used to transform an E. coli host based on strain 52 (W3110 fuhA(tonA) Ion galE rpoHts(htpRts) clpP(laclq). Transformants are first grown in LB containing 50 mg/ml carbenicillin at 30° C. with shaking until an O.D.600 of 3-5 is reached. Cultures are then diluted 50-100 fold into CRAP media (prepared by mixing 3.57 g (NH₄)₂SO₄, 0.71 g sodium citrate.2H2O, 1.07 g KCl, 5.36 g Difco yeast extract, 5.36 g Sheffield hycase SF in 500 mL water, as well as 110 mM MPOS, pH 7.3, 0.55% (w/v) glucose and 7 mM MgSO₄) and grown for approximately 20-30 hours at 30° C. with shaking. Samples are removed to verify expression by SDS-PAGE analysis, and the bulk culture is centrifuged to pellet the cells. Cell pellets are frozen until purification and refolding.

[1078] E. coli paste from 0.5 to 1 L fermentations (6-10 g pellets) is resuspended in 10 volumes (w/v) in 7 M guanidine, 20 mM Tris, pH 8 buffer. Solid sodium sulfite and sodium tetrathionate is added to make final concentrations of 0.1 M and 0.02 M, respectively, and the solution is stirred overnight at 4° C. This step results in a denatured protein with all cysteine residues blocked by sulfitolization. The solution is centrifuged at 40,000 rpm in a Beckman Ultracentifuge for 30 min. The supernatant is diluted with 3-5 volumes of metal chelate column buffer (6 M guanidine, 20 mM Tris, pH 7.4) and filtered through 0.22 micron filters to clarify. The clarified extract is loaded onto a 5 ml Qiagen Ni—NTA metal chelate column equilibrated in the metal chelate column buffer. The column is washed with additional buffer containing 50 mM imidazole (Calbiochem, Utrol grade), pH 7.4. The protein is eluted with buffer containing 250 mM imidazole. Fractions containing the desired protein are pooled and stored at 4° C. Protein concentration is estimated by its absorbance at 280 nm using the calculated extinction coefficient based on its amino acid sequence.

[1079] The proteins are refolded by diluting the sample slowly into freshly prepared refolding buffer consisting of: 20 mM Tris, pH 8.6, 0.3 M NaCl, 2.5 M urea, 5 mM cysteine, 20 mM glycine and 1 mM EDTA. Refolding volumes are chosen so that the final protein concentration is between 50 to 100 micrograms/ml. The refolding solution is stirred gently at 4° C. for 12-36 hours. The refolding reaction is quenched by the addition of TFA to a final concentration of 0.4% (pH of approximately 3). Before further purification of the protein, the solution is filtered through a 0.22 micron filter and acetonitrile is added to 2-10% final concentration. The refolded protein is chromatographed on a Poros R1/H reversed phase column using a mobile buffer of 0.1% TFA with elution with a gradient of acetonitrile from 10 to 80%. Aliquots of fractions with A280 absorbance are analyzed on SDS polyacrylamide gels and fractions containing homogeneous refolded protein are pooled. Generally, the properly refolded species of most proteins are eluted at the lowest concentrations of acetonitrile since those species are the most compact with their hydrophobic interiors shielded from interaction with the reversed phase resin. Aggregated species are usually eluted at higher acetonitrile concentrations. In addition to resolving misfolded forms of proteins from the desired form, the reversed phase step also removes endotoxin from the samples.

[1080] Fractions containing the desired folded PRO polypeptide are pooled and the acetonitrile removed using a gentle stream of nitrogen directed at the solution. Proteins are formulated into 20 mM Hepes, pH 6.8 with 0.14 M sodium chloride and 4% mannitol by dialysis or by gel filtration using G25 Superfine (Pharmacia) resins equilibrated in the formulation buffer and sterile filtered.

[1081] Many of the PRO polypeptides disclosed herein were successfully expressed as described above.

### Example 4

### Expression of PRO in Mammalian Cells

[1082] This example illustrates preparation of a potentially glycosylated form of PRO by recombinant expression in mammalian cells.

[1083] The vector, pRK5 (see EP 307,247, published Mar. 15, 1989), is employed as the expression vector. Optionally, the PRO DNA is ligated into pRK5 with selected restriction enzymes to allow insertion of the PRO DNA using ligation methods such as described in Sambrook et al., supra. The resulting vector is called pRK5-PRO.

[1084] In one embodiment, the selected host cells may be 293 cells. Human 293 cells (ATCC CCL 1573) are grown to confluence in tissue culture plates in medium such as DMEM supplemented with fetal calf serum and optionally, nutrient components and/or antibiotics. About 10 μg pRK5-PRO DNA is mixed with about 1 μg DNA encoding the VA RNA gene [Thimmappaya et al., Cell, 31:543 (1982)] and dissolved in 500 μl of 1 mM Tris-HCl, 0.1 mM EDTA, 0.227 M CaCl₂. To this mixture is added, dropwise, 500 μl of 50 mM HEPES (pH 7.35), 280 mM NaCl, 1.5 mM NaPO₄, and a precipitate is allowed to form for 10 minutes at 25° C. The precipitate is suspended and added to the 293 cells and allowed to settle for about four hours at 37° C. The culture medium is aspirated off and 2 ml of 20% glycerol in PBS is added for 30 seconds. The 293 cells are then washed with serum free medium, fresh medium is added and the cells are incubated for about 5 days.

[1085] Approximately 24 hours after the transfections, the culture medium is removed and replaced with culture medium (alone) or culture medium containing 200 μCi/ml ³⁵S-cysteine and 200 μCi/ml 35S-methionine. After a 12 hour incubation, the conditioned medium is collected, concentrated on a spin filter, and loaded onto a 15% SDS gel. The processed gel may be dried and exposed to film for a selected period of time to reveal the presence of PRO polypeptide. The cultures containing transfected cells may undergo further incubation (in serum free medium) and the medium is tested in selected bioassays.

[1086] In an alternative technique, PRO may be introduced into 293 cells transiently using the dextran sulfate method described by Somparyrac et al., Proc. Natl. Acad. Sci., 12:7575 (1981). 293 cells are grown to maximal density in a spinner flask and 700 μg pRK5-PRO DNA is added. The cells are first concentrated from the spinner flask by centrifugation and washed with PBS. The DNA-dextran precipitate is incubated on the cell pellet for four hours. The cells are treated with 20% glycerol for 90 seconds, washed with tissue culture medium, and re-introduced into the spinner flask containing tissue culture medium, 5 μg/ml bovine insulin and 0.1 μg/ml bovine transferrin. After about four days, the conditioned media is centrifuged and filtered to remove cells and debris. The sample containing expressed PRO can then be concentrated and purified by any selected method, such as dialysis and/or column chromatography.

[1087] In another embodiment, PRO can be expressed in CHO cells. The pRK5-PRO can be transfected into CHO cells using known reagents such as CaPO₄ or DEAE-dextran. As described above, the cell cultures can be incubated, and the medium replaced with culture medium (alone) or medium containing a radiolabel such as ³⁵S-methionine. After determining the presence of PRO polypeptide, the culture medium may be replaced with serum free medium. Preferably, the cultures are incubated for about 6 days, and then the conditioned medium is harvested. The medium containing the expressed PRO can then be concentrated and purified by any selected method.

[1088] Epitope-tagged PRO may also be expressed in host CHO cells. The PRO may be subcloned out of the pRK5 vector. The subclone insert can undergo PCR to fuse in frame with a selected epitope tag such as a poly-his tag into a Baculovirus expression vector. The poly-his tagged PRO insert can then be subcloned into a SV40 promoter/enhancer containing vector containing a selection marker such as DHFR for selection of stable clones. Finally, the CHO cells can be transfected (as described above) with the SV40 promoter/enhancer containing vector. Labeling may be performed, as described above, to verify expression. The culture medium containing the expressed poly-His tagged PRO can then be concentrated and purified by any selected method, such as by Ni²⁺-chelate affinity chromatography.

[1089] PRO may also be expressed in CHO and/or COS cells by a transient expression procedure or in CHO cells by another stable expression procedure.

[1090] Stable expression in CHO cells is performed using the following procedure. The proteins are expressed as an IgG construct (immunoadhesin), in which the coding sequences for the soluble forms (e.g. extracellular domains) of the respective proteins are fused to an IgG 1 constant region sequence containing the hinge, CH2 and CH2 domains and/or is a poly-His tagged form.

[1091] Following PCR amplification, the respective DNAs are subcloned in a CHO expression vector using standard techniques as described in Ausubel et al., Current Protocols of Molecular Biology, Unit 3.16, John Wiley and Sons (1997). CHO expression vectors are constructed to have compatible restriction sites 5′ and 3′ of the DNA of interest to allow the convenient shuttling of cDNA's. The vector used expression in CHO cells is as described in Lucas et al., Nucl. Acids Res. 24:9 (1774-1779 (1996), and uses the SV40 early promoter/enhancer to drive expression of the cDNA of interest and dihydrofolate reductase (DHFR). DHFR expression permits selection for stable maintenance of the plasmid following transfection.

[1092] Twelve micrograms of the desired plasmid DNA is introduced into approximately 10 million CHO cells using commercially available transfection reagents Superfect® (Quiagen), Dosper® or Fugene® (Boehringer Mannheim). The cells are grown as described in Lucas et al., supra. Approximately 3×10⁻⁷ cells are frozen in an ampule for further growth and production as described below.

[1093] The ampules containing the plasmid DNA are thawed by placement into water bath and mixed by vortexing. The contents are pipetted into a centrifuge tube containing 10 mL of media and centrifuged at 1000 rpm for 5 minutes. The supernatant is aspirated and the cells are resuspended in 10 mL of selective media (0.2 μm filtered PS20 with 5% 0.2 μm diafiltered fetal bovine serum). The cells are then aliquoted into a 100 mL spinner containing 90 mL of selective media. After 1-2 days, the cells are transferred into a 250 mL spinner filled with 150 mL selective growth medium and incubated at 37° C. After another 2-3 days, 250 mL, 500 mL and 2000 mL spinners are seeded with 3×10⁵ cells/mL. The cell media is exchanged with fresh media by centrifugation and resuspension in production medium. Although any suitable CHO media may be employed, a production medium described in U.S. Pat. No. 5,122,469, issued Jun. 16, 1992 may actually be used. A 3L production spinner is seeded at 1.2×10⁶ cells/mL. On day 0, pH is determined. On day 1, the spinner is sampled and sparging with filtered air is commenced. On day 2, the spinner is sampled, the temperature shifted to 33° C., and 30 mL of 500 g/L glucose and 0.6 mL of 10% antifoam (e.g., 35% polydimethylsiloxane emulsion, Dow Corning 365 Medical Grade Emulsion) taken. Throughout the production, the pH is adjusted as necessary to keep it at around 7.2. After 10 days, or until the viability dropped below 70%, the cell culture is harvested by centrifugation and filtering through a 0.22 μm filter. The filtrate was either stored at 4° C. or immediately loaded onto columns for purification.

[1094] For the poly-His tagged constructs, the proteins are purified using a Ni—NTA column (Qiagen). Before purification, imidazole is added to the conditioned media to a concentration of 5 mM. The conditioned media is pumped onto a 6 ml Ni—NTA column equilibrated in 20 mM Hepes, pH 7.4, buffer containing 0.3 M NaCl and 5 mM imidazole at a flow rate of 4-5 ml/min. at 4° C. After loading, the column is washed with additional equilibration buffer and the protein eluted with equilibration buffer containing 0.25 M imidazole. The highly purified protein is subsequently desalted into a storage buffer containing 10 mM Hepes, 0.14 M NaCl and 4% mannitol, pH 6.8, with a 25 ml G25 Superfine (Pharmacia) column and stored at −80° C.

[1095] Immunoadhesin (Fc-containing) constructs are purified from the conditioned media as follows. The conditioned medium is pumped onto a 5 ml Protein A column (Pharmacia) which had been equilibrated in 20 mM Na phosphate buffer, pH 6.8. After loading, the column is washed extensively with equilibration buffer before elution with 100 mM citric acid, pH 3.5. The eluted protein is immediately neutralized by collecting 1 ml fractions into tubes containing 275 μl of 1 M Tris buffer, pH 9. The highly purified protein is subsequently desalted into storage buffer as described above for the poly-His tagged proteins. The homogeneity is assessed by SDS polyacrylamide gels and by N-terminal amino acid sequencing by Edman degradation.

[1096] Many of the PRO polypeptides disclosed herein were successfully expressed as described above.

### Example 5

### Expression of PRO in Yeast

[1097] The following method describes recombinant expression of PRO in yeast.

[1098] First, yeast expression vectors are constructed for intracellular production or secretion of PRO from the ADH2/GAPDH promoter. DNA encoding PRO and the promoter is inserted into suitable restriction enzyme sites in the selected plasmid to direct intracellular expression of PRO. For secretion, DNA encoding PRO can be cloned into the selected plasmid, together with DNA encoding the ADH2/GAPDH promoter, a native PRO signal peptide or other mammalian signal peptide, or, for example, a yeast alpha-factor or invertase secretory signal/leader sequence, and linker sequences (if needed) for expression of PRO.

[1099] Yeast cells, such as yeast strain AB 110, can then be transformed with the expression plasmids described above and cultured in selected fermentation media. The transformed yeast supernatants can be analyzed by precipitation with 10% trichloroacetic acid and separation by SDS-PAGE, followed by staining of the gels with Coomassie Blue stain.

[1100] Recombinant PRO can subsequently be isolated and purified by removing the yeast cells from the fermentation medium by centrifugation and then concentrating the medium using selected cartridge filters. The concentrate containing PRO may further be purified using selected column chromatography resins.

[1101] Many of the PRO polypeptides disclosed herein were successfully expressed as described above.

### Example 6

### Expression of PRO in Baculovirus-Infected Insect Cells

[1102] The following method describes recombinant expression of PRO in Baculovirus-infected insect cells.

[1103] The sequence coding for PRO is fused upstream of an epitope tag contained within a baculovirus expression vector. Such epitope tags include poly-his tags and immunoglobulin tags (like Fe regions of IgG). A variety of plasmids may be employed, including plasmids derived from commercially available plasmids such as pVL1393 (Novagen). Briefly, the sequence encoding PRO or the desired portion of the coding sequence of PRO such as the sequence encoding the extracellular domain of a transmembrane protein or the sequence encoding the mature protein if the protein is extracellular is amplified by PCR with primers complementary to the 5′ and 3′ regions. The 5′ primer may incorporate flanking (selected) restriction enzyme sites. The product is then digested with those selected restriction enzymes and subcloned into the expression vector.

[1104] Recombinant baculovirus is generated by co-transfecting the above plasmid and BaculoGold™ virus DNA (Pharmingen) into Spodoptera frugiperda (“Sf9”) cells (ATCC CRL 1711) using lipofectin (commercially available from GIBCO-BRL). After 4-5 days of incubation at 28° C., the released viruses are harvested and used for further amplifications. Viral infection and protein expression are performed as described by O'Reilley et al., Baculovirus expression vectors: A Laboratory Manual, Oxford: Oxford University Press (1994).

[1105] Expressed poly-his tagged PRO can then be purified, for example, by Ni²⁺-chelate affinity chromatography as follows. Extracts are prepared from recombinant virus-infected Sf9 cells as described by Rupert et al., Nature, 362:175-179 (1993). Briefly, Sf9 cells are washed, resuspended in sonication buffer (25 mL Hepes, pH 7.9; 12.5 mM MgCl₂; 0.1 mM EDTA; 10% glycerol; 0.1% NP-40; 0.4 M KCl), and sonicated twice for 20 seconds on ice. The sonicates are cleared by centrifugation, and the supernatant is diluted 50-fold in loading buffer (50 mM phosphate, 300 mM NaCl, 10% glycerol, pH 7.8) and filtered through a 0.45 μm filter. A Ni²⁺-NTA agarose column (commercially available from Qiagen) is prepared with a bed volume of 5 mL, washed with 25 mL of water and equilibrated with 25 mL of loading buffer. The filtered cell extract is loaded onto the column at 0.5 mL per minute. The column is washed to baseline A₂₈₀) with loading buffer, at which point fraction collection is started. Next, the column is washed with a secondary wash buffer (50 mM phosphate; 300 mM NaCl, 10% glycerol, pH 6.0), which elutes nonspecifically bound protein. After reaching A₂₈₀ baseline again, the column is developed with a 0 to 500 mM Imidazole gradient in the secondary wash buffer. One mL fractions are collected and analyzed by SDS-PAGE and silver staining or Western blot with Ni²⁺-NTA-conjugated to alkaline phosphatase (Qiagen). Fractions containing the eluted His₁₀-tagged PRO are pooled and dialyzed against loading buffer.

[1106] Alternatively, purification of the IgG tagged (or Fe tagged) PRO can be performed using known chromatography techniques, including for instance, Protein A or protein G column chromatography.

[1107] Many of the PRO polypeptides disclosed herein were successfully expressed as described above.

### Example 7

### Preparation of Antibodies that Bind PRO

[1108] This example illustrates preparation of monoclonal antibodies which can specifically bind PRO.

[1109] Techniques for producing the monoclonal antibodies are known in the art and are described, for instance, in Goding, supra. Immunogens that may be employed include purified PRO, fusion proteins containing PRO, and cells expressing recombinant PRO on the cell surface. Selection of the immunogen can be made by the skilled artisan without undue experimentation.

[1110] Mice, such as Balb/c, are immunized with the PRO immunogen emulsified in complete Freund's adjuvant and injected subcutaneously or intraperitoneally in an amount from 1-100 micrograms. Alternatively, the immunogen is emulsified in MPL-TDM adjuvant (Ribi Immunochemical Research, Hamilton, Mont.) and injected into the animal's hind foot pads. The immunized mice are then boosted 10 to 12 days later with additional immunogen emulsified in the selected adjuvant. Thereafter, for several weeks, the mice may also be boosted with additional immunization injections. Serum samples may be periodically obtained from the mice by retro-orbital bleeding for testing in ELISA assays to detect anti-PRO antibodies.

[1111] After a suitable antibody titer has been detected, the animals “positive” for antibodies can be injected with a final intravenous injection of PRO. Three to four days later, the mice are sacrificed and the spleen cells are harvested. The spleen cells are then fused (using 35% polyethylene glycol) to a selected murine myeloma cell line such as P3×63AgU0.1, available from ATCC, No. CRL 1597. The fusions generate hybridoma cells which can then be plated in 96 well tissue culture plates containing HAT (hypoxanthine, aminopterin, and thymidine) medium to inhibit proliferation of non-fused cells, myeloma hybrids, and spleen cell hybrids.

[1112] The hybridoma cells will be screened in an ELISA for reactivity against PRO. Determination of “positive” hybridoma cells secreting the desired monoclonal antibodies against PRO is within the skill in the art.

[1113] The positive hybridoma cells can be injected intraperitoneally into syngeneic Balb/c mice to produce ascites containing the anti-PRO monoclonal antibodies. Alternatively, the hybridoma cells can be grown in tissue culture flasks or roller bottles. Purification of the monoclonal antibodies produced in the ascites can be accomplished using ammonium sulfate precipitation, followed by gel exclusion chromatography. Alternatively, affinity chromatography based upon binding of antibody to protein A or protein G can be employed.

### Example 8

### Purification of PRO Polypeptides Using Specific Antibodies

[1114] Native or recombinant PRO polypeptides may be purified by a variety of standard techniques in the art of protein purification. For example, pro-PRO polypeptide, mature PRO polypeptide, or pre-PRO polypeptide is purified by immunoaffinity chromatography using antibodies specific for the PRO polypeptide of interest. In general, an immunoaffinity column is constructed by covalently coupling the anti-PRO polypeptide antibody to an activated chromatographic resin.

[1115] Polyclonal immunoglobulins are prepared from immune sera either by precipitation with ammonium sulfate or by purification on immobilized Protein A (Pharmacia LKB Biotechnology, Piscataway, N.J.). Likewise, monoclonal antibodies are prepared from mouse ascites fluid by ammonium sulfate precipitation or chromatography on immobilized Protein A. Partially purified immunoglobulin is covalently attached to a chromatographic resin such as CnBr-activated SEPHAROSE™ (Pharmacia LKB Biotechnology). The antibody is coupled to the resin, the resin is blocked, and the derivative resin is washed according to the manufacturer's instructions.

[1116] Such an immunoaffinity column is utilized in the purification of PRO polypeptide by preparing a fraction from cells containing PRO polypeptide in a soluble form. This preparation is derived by solubilization of the whole cell or of a subcellular fraction obtained via differential centrifugation by the addition of detergent or by other methods well known in the art. Alternatively, soluble PRO polypeptide containing a signal sequence may be secreted in useful quantity into the medium in which the cells are grown.

[1117] A soluble PRO polypeptide-containing preparation is passed over the immunoaffinity column, and the column is washed under conditions that allow the preferential absorbance of PRO polypeptide (e.g., high ionic strength buffers in the presence of detergent). Then, the column is eluted under conditions that disrupt antibody/PRO polypeptide binding (e.g., a low pH buffer such as approximately pH 2-3, or a high concentration of a chaotrope such as urea or thiocyanate ion), and PRO polypeptide is collected.

### Example 9

### Drug Screening

[1118] This invention is particularly useful for screening compounds by using PRO polypeptides or binding fragment thereof in any of a variety of drug screening techniques. The PRO polypeptide or fragment employed in such a test may either be free in solution, affixed to a solid support, borne on a cell surface, or located intracellularly. One method of drug screening utilizes eukaryotic or prokaryotic host cells which are stably transformed with recombinant nucleic acids expressing the PRO polypeptide or fragment Drugs are screened against such transformed cells in competitive binding assays. Such cells, either in viable or fixed form, can be used for standard binding assays. One may measure, for example, the formation of complexes between PRO polypeptide or a fragment and the agent being tested. Alternatively, one can examine the diminution in complex formation between the PRO polypeptide and its target cell or target receptors caused by the agent being tested.

[1119] Thus, the present invention provides methods of screening for drugs or any other agents which can affect a PRO polypeptide-associated disease or disorder. These methods comprise contacting such an agent with an PRO polypeptide or fragment thereof and assaying (I) for the presence of a complex between the agent and the PRO polypeptide or fragment, or (ii) for the presence of a complex between the PRO polypeptide or fragment and the cell, by methods well known in the art. In such competitive binding assays, the PRO polypeptide or fragment is typically labeled. After suitable incubation, free PRO polypeptide or fragment is separated from that present in bound form, and the amount of free or uncomplexed label is a measure of the ability of the particular agent to bind to PRO polypeptide or to interfere with the PRO polypeptide/cell complex.

[1120] Another technique for drug screening provides high throughput screening for compounds having suitable binding affinity to a polypeptide and is described in detail in WO 84/03564, published on Sep. 13, 1984. Briefly stated, large numbers of different small peptide test compounds are synthesized on a solid substrate, such as plastic pins or some other surface. As applied to a PRO polypeptide, the peptide test compounds are reacted with PRO polypeptide and washed. Bound PRO polypeptide is detected by methods well known in the art. Purified PRO polypeptide can also be coated directly onto plates for use in the aforementioned drug screening techniques. In addition, non-neutralizing antibodies can be used to capture the peptide and immobilize it on the solid support.

[1121] This invention also contemplates the use of competitive drug screening assays in which neutralizing antibodies capable of binding PRO polypeptide specifically compete with a test compound for binding to PRO polypeptide or fragments thereof. In this manner, the antibodies can be used to detect the presence of any peptide which shares one or more antigenic determinants with PRO polypeptide.

### Example 10

### Rational Drug Design

[1122] The goal of rational drug design is to produce structural analogs of biologically active polypeptide of interest (i.e., a PRO polypeptide) or of small molecules with which they interact, e.g., agonists, antagonists, or inhibitors. Any of these examples can be used to fashion drugs which are more active or stable forms of the PRO polypeptide or which enhance or interfere with the function of the PRO polypeptide in vivo (cf, Hodgson, Bio/Technology, 9: 19-21 (1991 )).

[1123] In one approach, the three-dimensional structure of the PRO polypeptide, or of a PRO polypeptide-inhibitor complex, is determined by x-ray crystallography, by computer modeling or, most typically, by a combination of the two approaches. Both the shape and charges of the PRO polypeptide must be ascertained to elucidate the structure and to determine active site(s) of the molecule. Less often, useful information regarding the structure of the PRO polypeptide may be gained by modeling based on the structure of homologous proteins. In both cases, relevant structural information is used to design analogous PRO polypeptide-like molecules or to identify efficient inhibitors. Useful examples of rational drug design may include molecules which have improved activity or stability as shown by Braxton and Wells, Biochemistry, 31:7796-7801 (1992) or which act as inhibitors, agonists, or antagonists of native peptides as shown by Athauda et al., J. Biochem., 113:742-746 (1993).

[1124] It is also possible to isolate a target-specific antibody, selected by functional assay, as described above, and then to solve its crystal structure. This approach, in principle, yields a pharmacore upon which subsequent drug design can be based. It is possible to bypass protein crystallography altogether by generating anti-idiotypic antibodies (anti-ids) to a functional, pharmacologically active antibody. As a mirror image of a mirror image, the binding site of the anti-ids would be expected to be an analog of the original receptor. The anti-id could then be used to identify and isolate peptides from banks of chemically or biologically produced peptides. The isolated peptides would then act as the pharmacore.

[1125] By virtue of the present invention, sufficient amounts of the PRO polypeptide may be made available to perform such analytical studies as X-ray crystallography. In addition, knowledge of the PRO polypeptide amino acid sequence provided herein will provide guidance to those employing computer modeling techniques in place of or in addition to x-ray crystallography.

[1126] The foregoing written specification is considered to be sufficient to enable one skilled in the art to practice the invention. The present invention is not to be limited in scope by the construct deposited, since the deposited embodiment is intended as a single illustration of certain aspects of the invention and any constructs that are functionally equivalent are within the scope of this invention. The deposit of material herein does not constitute an admission that the written description herein contained is inadequate to enable 40 the practice of any aspect of the invention, including the best mode thereof, nor is it to be construed as limiting the scope of the claims to the specific illustrations that it represents. Indeed, various modifications of the invention in addition to those shown and described herein will become apparent to those skilled in the art from the foregoing description and fall within the scope of the appended claims.

1. Isolated nucleic acid having at least 80% nucleic acid sequence identity to a nucleotide sequence encoding the polypeptide shown in FIG. 216

2. Isolated nucleic acid having at least 80% nucleic acid sequence identity to a nucleotide sequence comprising the nucleotide sequence shown in FIG. 215 (SEQ ID NO:215)

3. Isolated nucleic acid having at least 80% nucleic acid sequence identity to a nucleotide sequence comprising the full-length coding sequence of the nucleotide sequence shown in FIG. 215 (SEQ ID NO:215)

4. A vector comprising the nucleic acid of claim 1.

5. The vector of claim 4 operably linked to control sequences recognized by a host cell transformed with the vector.

6. A host cell comprising the vector of claim 5.

7. The host cell of claim 6, wherein said cell is a CHO cell, an E. coli cell or a yeast

8. A process for producing a PRO polypeptide comprising culturing the host cell of claim 6 under conditions suitable for expression of said PRO polypeptide and recovering said PRO polypeptide from the cell culture.

9. An isolated polypeptide having at least 80% amino acid sequence identity to an amino acid sequence of the polypeptide shown in FIG. 216 (SEQ ID NO:216)

10. A chimeric molecule comprising a polypeptide according to claim 9 fused to a heterologous amino acid sequence.

11. The chimeric molecule of claim 10, wherein said heterologous amino acid sequence is an epitope tag sequence or an Fc region of an immunoglobulin.

12. An antibody which specifically binds to a polypeptide according to claim 9.

13. The antibody of claim 12, wherein said antibody is a monoclonal antibody, a humanized antibody or a single-chain antibody.

14. A composition of matter comprising (a) a polypeptide of claim 9, (b) an agonist of said polypeptide, (c) an antagonist of said polypeptide, or (d) an antibody that binds to said polypeptide, in combination with a carrier.

15. The composition of matter of claim 14, wherein said carrier is a pharmaceutically acceptable carrier.

16. The composition of matter of claim 14 comprising a therapeutically effective amount of (a), (b), (c) or (d).

17. An article of manufacture, comprising:
a container;
a label on said container; and
a composition of matter comprising (a) a polypeptide of claim 9, (b) an agonist of said polypeptide, (c) an antagonist of said polypeptide, or (d) an antibody that binds to said polypeptide, contained within said container, wherein label on said container indicates that said composition of matter can be used for treating an immune related disease.

18. A method of treating an immune related disorder in a mammal in need thereof comprising administering to said mammal a therapeutically effective amount of (a) a polypeptide of claim 9, (b) an agonist of said polypeptide, (c) an antagonist of said polypeptide, or (d) an antibody that binds to said polypeptide.

19. The method of claim 18, wherein the immune related disorder is systemic lupus erythematosis, rheumatoid arthritis, osteoarthritis, juvenile chronic arthritis, a spondyloarthropathy, systemic sclerosis, an idiopathic inflammatory myopathy, Sjögren's syndrome, systemic vasculitis, sarcoidosis, autoimmune hemolytic anemia, autoimmune thrombocytopenia, thyroiditis, diabetes mellitus, immune-mediated renal disease, a demyelinating disease of the central or peripheral nervous system, idiopathic demyelinating polyneuropathy, Guillain-Barré syndrome, a chronic inflammatory demyelinating polyneuropathy, a hepatobiliary disease, infectious or autoimmune chronic active hepatitis, primary biliary cirrhosis, granulomatous hepatitis, sclerosing cholangitis, inflammatory bowel disease, gluten-sensitive enteropathy, Whipple's disease, an autoimmune or immune-mediated skin disease, a bullous skin disease, erythema multiforme, contact dermatitis, psoriasis, an allergic disease, asthma, allergic rhinitis, atopic dermatitis, food hypersensitivity, urticaria, an immunologic disease of the lung, eosinophilic pneumonias, idiopathic pulmonary fibrosis, hypersensitivity pneumonitis, a transplantation associated disease, graft rejection or graft-versus-host-disease.

20. A method for determining the presence of a polypeptide in a sample suspected of containing said polypeptide, said method comprising exposing said sample to an anti-PRO51309 antibody and determining binding of said antibody to a component of said sample.

21. A method of diagnosing an immune related disease in a mammal, said method comprising detecting the level of expression of a gene encoding PRO51309 polypeptide (a) in a test sample of tissue cells obtained from the mammal, and (b) in a control sample of known normal tissue cells of the same cell type, wherein a higher or lower level of expression of said gene in the test sample as compared to the control sample is indicative of the presence of an immune related disease in the mammal from which the test tissue cells were obtained.

22. A method of diagnosing an immune related disease in a mammal, said method comprising (a) contacting anti-PRO51309 antibody with a test sample of tissue cells obtained from said mammal and (b) detecting the formation of a complex between the antibody and the polypeptide in the test sample, wherein formation of said complex is indicative of the presence of an immune related disease in the mammal from which the test tissue cells were obtained.

23. A method of identifying a compound that inhibits the activity of PRO51309 polypeptide, said method comprising contacting cells which normally respond to said polypeptide with (a) said polypeptide and (b) a candidate compound, and determining the lack responsiveness by said cell to (a).

24. A method of identifying a compound that inhibits the expression of a gene encoding a PRO51309 polypeptide, said method comprising contacting cells which normally express said polypeptide with a candidate compound, and determining the lack of expression said gene.

25. The method of claim 24, wherein said candidate compound is an antisense nucleic acid.

26. A method of identifying a compound that mimics the activity of a PRO51309 polypeptide, said method comprising contacting cells which normally respond to said polypeptide with a candidate compound, and determining the responsiveness by said cell to said candidate compound.

27. A method of stimulating the immune response in a mammal, said method comprising administering to said mammal an effective amount of a polypeptide antagonist, wherein said immune response is stimulated.

28. A method of diagnosing an inflammatory immune response in a mammal, said method comprising detecting the level of expression of a gene encoding PRO51309 polypeptide (a) in a test sample of tissue cells obtained from the mammal, and (b) in a control sample of known normal tissue cells of the same cell type, wherein a higher or lower level of expression of said gene in the test sample as compared to the control sample is indicative of the presence of an inflammatory immune response in the mammal from which the test tissue cells were obtained.

The application's sequence listing, which the Patent Office published only in electronic form, follows.

SEQUENCE LISTING (742 sequences)

SEQ ID NO: 1 - DNA, 2148 bp, Homo sapien
gcgtgaagcgcggacctttcaacaagggctttattaattctcacgctgcggccccggaaagcgatggaggtggcggctaattgctccctacgggtgaagagacctctgttggatccccgcttcgagggttacaagctctctcttgagccgctgccttgttaccagctggagcttgacgcagctgtggcagaggtaaaacttcgagatgatcaatatacactggaacacatgcatgcttttggaatgtataattacctgcactgtgattcatggtatcaagacagtgtctactatattgatacccttggaagaattatgaatttaacagtaatgctggacactgccttaggaaaaccacgagaggtgtttcgacttcctacagatttgacagcatgtgacaaccgtctttgtgcatctatccatttctcatcttctacctgggttaccttgtcagatggaactggaagattgtatgtcattggaacaggtgaacgtggaaatagcgcttctgaaaaatgggagattatgtttaatgaagaacttggggatccttttattataattcacagtatctcactgctaaatgctgaagaacattctatagctaccctacttcttcgaatagagaaagaggaattggatatgaaaggaagtggtttctatgtttctctggagtgggtcactatcagtaagaaaaatcaagataataaaaaatatgaaattattaagcgtgatattctccgtggaaagtcagtgccacattatgctgctattgagcctgatggaaatggtctaatgattgtatcctacaagtctttaacatttgttcaggctggtcaagatcttgaagaaaatatggatgaagacatatcagagaaaatcaaagaacctctgtattactggcaacagactgaagatgatttgacagtaaccatacggcttccagaagacagtactaaggaggacattcaaatacagtttttgcctgatcacatcaacattgtactgaaggatcaccagtttttagaaggaaaactctattcatctattgatcatgaaagcagtacatggataattaaagagagtaatagcttggagatttccttgattaagaagaatgaaggactgacctggccagagctagtaattggagataaacaaggggaacttataagagattcagcccagtgtgctgcaatagctgaacgtttgatgcatttgacctctgaagaactgaatccaaatccagataaagaaaaaccaccttgcagtgctcaagagttagaagaatgtgatattttctttgaagagagctccagtttatgcagatttgatggcaatacattaaaaactactcatgtggtgaatcttggaagcaaccagtaccttttctctgtcatagtggatcctaaagaaatgccctgcttctgtttgcgccatgatgttgatgccctactctggcaaccacactccagcaaacaagatgatatgtgggagcacatcgcaactttcaatgctttaggctatgtccaagcatcaaagagagacaaaaaattttttgcctgtgctccaaattactcgtatgcagccctttgtgagtgccttcgtcgagtattcatctatcgtcagcctgctcccatgtccactgtactttacaacagaaaggaaggcaggcaagtaggacaggttgctaagcagcaagtagcaagcctagaaaccaatgatcctattttaggatttcaggcaacaaatgagagattatttgttcttactaccaaaaacctctttttaataaaagtaaatacagagaattaattattctaacatattggcctctttgtactggaaaagtattcagtggtacctggaggtctggacagttatactgtaacctcttaagttttaatgtgctaaatatatcttgtatgattttttattttttaataacattggaaatatattcaagagattatgattctgtaaagctgtggaatgaagctgcagatttagagaacattggcttctgaaaaaaaaaaagagtgaagatagtactagcaagtatacttattttttaaaacaggctagaatctcatgttttatatgaaagatgtacaattcagtgtttaaaaataaaaatatttattgtgt

SEQ ID NO: 2 - protein, 583 aa, Homo sapien [sequence omitted]

SEQ ID NO: 3 - DNA, 1626 bp, Homo sapien
gaattccggtgaagttgaccgggtccacccgaagcttgtgcgcgtgcaggtcgctcagggcggacgcggcacggagacggcggcagcctggactaggtggcaggccctgcatcatggaaactctttctaatgcaagtggtacttttgccatacgccttttaaagatactgtgtcaagataacccttcgcacaacgtgttctgttctcctgtgagcatctcctctgccctggccatggttctcctaggggcaaagggaaacaccgcaacccagatggcccaggcactgtctttaaacacagaggaagacattcatcgggctttccagtcgcttctcactgaagtgaacaaggctggcacacagtacctgctgagaacggccaacaggctctttggagagaaaacttgtcagttcctctcaacgtttaaggaatcctgtcttcaattctaccatgctgagctgaaggagctttcctttatcagagctgcagaagagtccaggaaacacatcaacacctgggtctcaaaaaagaccgaaggtaaaattgaagagttgttgccgggtagctcaattgatgcagaaaccaggctggttcttgtcaatgccatctacttcaaaggaaagtggaatgaaccgtttgacgaaacatacacaagggaaatgccctttaaaataaaccaggaggagcaaaggccagtgcagatgatgtatcaggaggccacgtttaagctcgcccacgtgggcgaggtgcgcgcgcagctgctggagctgccctacgccaggaaggagctgagcctgctggtgctgctgcctgacgacggcgtggagctcagcacggtggaaaaaagtctcacttttgagaaactcacagcctggaccaagccagactgtatgaagagtactgaggttgaagttctccttccaaaatttaaactacaagaggattatgacatggaatctgtgcttcggcatttgggaattgttgatgccttccaacagggcaaggctgacttgtcggcaatgtcagcggagagagacctgtgtctgtccaagttcgtgcacaagagttttgtggaggtgaatgaagaaggcaccgaggcagcggcagcgtcgagctgctttgtagttgcagagtgctgcatggaatctggccccaggttctgtgctgaccaccctttccttttcttcatcaggcacaacagagccaacagcattctgttctgtggcaggttctcatcgccataaagggtgcacttaccgtgcactcggccatttccctcttcctgtgtccccagatccccactacagctccaagaggatgggcctagaaagccaagtgcaaagatgagggcagattccttacctgtctgccctcatgatttgccagcatgaattcatgatgctccacactcgcttatgctacttaatcagaatcttgagaaaatagaccataatgattccctgttgtattaaaattgccatcccccgaattcccataggatggcaagcaaagttcttctagaattccacatgcaattcactctggcgaccctgtgctttcctgacactgcgaatacattccttaacccgctgcctcagtggtaataaatggtgctagccggaattc

SEQ ID NO: 4 - protein, 376 aa, Homo sapien
METLSNASGTFAIRLLKILCQDNPSHNVFCSPVSISSALAMVLLGAKGNTATQMAQALSLNTEEDIHRAFQSLLTEVNKAGTQYLLRTANRLFGEKTCQFLSTFKESCLQFYHAELKELSFIRAAEESRKHINTWVSKKTEGKIEELLPGSSIDAETRLVLVNAIYFKGKWNEPFDETYTREMPFKINQEEQRPVQMMYQEATFKLAHVGEVRAQLLELPYARKELSLLVLLPDDGVELSTVEKSLTFEKLTAWTKPDCMKSTEVEVLLPKFKLQEDYDMESVLRHLGIVDAFQQGKADLSAMSAERDLCLSKFVHKSFVEVNEEGTEAAAASSCFVVAECCMESGPRFCADHPFLFFIRHNRANSILFCGRFSSP

SEQ ID NO: 5 - DNA, 1495 bp, Homo sapien
gctaagcgtcccagccgcatcctcccgcagcgacggcggcccgggaccgcgggctgtgaaccatgaacacccgcaatagagtggtgaactccgggctcggcgcctcccctgcctcccgcccgacccgggatccccaggacccttctgggcggcaaggggagctgagccccgtggaagaccagagagagggtttggaggcagcccctaagggcccttcgcgggagagcgtcgtgcacgcgggccagaggcgcacaagtgcatacaccttgatagcaccaaatataaaccggagaaatgagatacaaagaatgcggagcaggagctggccaacctggagaagtggaaggagcagaacagagctaaaccggttcacctggtgcccagacggctaggtggaagccagtcagaaactgaagtcagacagaaacaacaactccagctgatgcaatctaaatacaagcaaaagctaaaaagagaagaatctgtaagaatcaagaaggaagctgaagaagctgaactccaaaaaatgaaggcaattcagagagagaagagcaataaactggaggagaaaaaaagacttcaagaaaaccttagaagagaagcatttagagagcatcagcaatacaaaaccgctgagttcttgagcaaactgaacacagaatcgccagacagaagtgcctgtcaaagtgctgtttgtggcccacaatcctcaacatgggccagaagctgggcttacagagattctctaaaggcagaagaaaacagaaaattgcaaaagatgaaggatgaacaacatcaaaagagtgaattactggaactgaaacggcagcagcaagagcaagaaagagccaaaatccaccagactgaacacaggagggtaaataatgcttttctggaccgactccaaggtaaaagtcaaccaggtggcctcgagcaatctggaggctgttggaatatgaatagtggtaacagctggggtatatgagaaaatattgactcctatctggccttcatcaactgacctcgaaaagcctcatgagatgctttttcttaatgtgattttgttcagcctcactgtttttaccttaatttcaactgcccacacacttgaccgtgcagtcaggagtgactggcttctccttgtcctcatttatgcatgtttggaggagctgattcctgaactcatatttaatctctactgccagggaaatgctacattatttttctaattggaagtataattagagtgatgttggtagggtggaaaaagagggagtcacttgatgctttcaggttaatcagagctatgggtgctacaggcttgtctttctaagtgacatattcttatctaattctcagatcaggttttgaaaagctttgggggtctttttagattttaatccctactttctttatggtacaaatatgtacaaaagaaaaaggtcttatattcttttacacaaatttataaataaattttgaactccttctgtat

SEQ ID NO: 6 - protein, 152 aa, Homo sapien [sequence omitted]

SEQ ID NO: 7 - DNA, 3065 bp, Homo sapien
tagttattaaagttcctatgcagctccgcctccgtccggcctcatttcctcaaaaaatccctgctttccccgctcgccacgccctcctgctacccggctttaaagctagtgaggcacagcctgcggggaacgtagctagctgcaagcagaggccggcatgaccaccgagcagcgacgcagcctgcaagccttccaggattatatccggaagaccctggaccctacctacatcctgagctacatggccccctggtttagggaggaagaggtgcagtatattcaggctgagaaaaacaacaagggcccaatggaggctgccacactttttctcaagttcctgttggagctccaggaggaaggctggttccgtggctttttggatgccctagaccatgcaggttattctggactttatgaagccattgaaagttgggatttcaaaaaaattgaaaagttggaggagtatagattacttttaaaacgtttacaaccagaatttaaaaccagaattatcccaaccgatatcatttctgatctgtctgaatgtttaattaatcaggaatgtgaagaaattctacagatttgctctactaaggggatgatggcaggtgcagagaaattggtggaatgccttctcagatcagacaaggaaaactggcccaaaactttgaaacttgctttggagaaagaaaggaacaagttcagtgaactgtggattgtagagaaaggtataaaagatgttgaaacagaagatcttgaggataagatggaaacttctgacatacagattttctaccaagaagatccagaatgccagaatcttagtgagaattcatgtccaccttcagaagtgtctgatacaaacttgtacagcccatttaaaccaagaaattaccaattagagcttgctttgcctgctatgaaaggaaaaaacacaataatatgtgctcctacaggttgtggaaaaacctttgtttcactgcttatatgtgaacatcatcttaaaaaattcccacaaggacaaaaggggaaagttgtcttttttgcgaatcagatcccagtgtatgaacagcagaaatctgtattctcaaaatactttgaaagacatgggtatagagttacaggcatttctggagcaacagctgagaatgtcccagtggaacagattgttgagaacaatgacatcatcattttaactccacagattcttgtgaacaaccttaaaaagggaacgattccatcactatccatctttactttgatgatatttgatgaatgccacaacactagtaaacaacacccgtacaatatgatcatgtttaattatctagatcagaaacttggaggatcttcaggcccactgccccaggtcattgggctgactgcctcggttggtgttggggatgccaaaaacacagatgaagccttggattatatctgcaagctgtgtgcttctcttgatgcgtcagtgatagcaacagtcaaacacaatctggaggaactggagcaagttgtttataagccccagaagtttttcaggaaagtggaatcacggattagcgacaaatttaaatacatcatagctcagctgatgagggacacagagagtctggcaaagagaatctgcaaagacctcgaaaacttatctcaaattcaaaatagggaatttggaacacagaaatatgaacaatggattgttacagttcagaaagcatgcatggtgttccagatgccagacaaagatgaagagagcaggatttgtaaagccctgtttttatacacttcacatttgcggaaatataatgatgccctcattatcagtgagcatgcacgaatgaaagatgctctggattacttgaaagacttcttcagcaatgtccgagcagcaggattcgaagagattgagcaagatcttactcagagatttgaagaaaagctgcaggaactagaaagtgtttccagggatcccagcaatgagaatcctaaacttgaagacctctgcttcatcttacaagaagagtaccacttaaacccagagacaataacaattctctttgtgaaaaccagagcacttgtggacgctttaaaaaattggattgaaggaaatcctaaactcagttttctaaaacctggcatattgactggacgtggcaaaacaaatcagaacacaggaatgaccctcccggcacagaagtgtatattggatgcattcaaagccagtggagatcacaatattctgattgccacctcagttgctgatgaaggcattgacattgcacagtgcaatcttgtcatcctttatgagtatgtgggcaatgtcatcaaaatgatccaaaccagaggcagaggaagagcaagaggtagcaagtgcttccttctgactagtaatgctggtgtaattgaaaaagaacaaataaacatgtacaaagaaaaaatgatgaatgactctattttacgccttcagacatgggacgaagcagtatttagggaaaagattctgcatatacagactcatgaaaaattcatcagagatagtcaagaaaaaccaaaacctgtccctgataaggaaaataaaaaactgctctgcagaaagtgcaaagccttggcatgttacacagctgacgtaagagtgatagaggaatgccattacactgtgcttggagatgcttttaaggaatgctttgtgagtagaccacatcccaagccaaagcagttttcaagttttgaaaaaagagcaaagatattctgtgcccgacagaactgcagccatgactggggaatccatgtgaagtacaagacatttgagattccagttataaaaattgaaagttttgtggtggaggatattgcaactggagttcagacactgtactcgaagtggaaggactttcattttgagaagataccatttgatccagcagaaatgtccaaatgatatcaggtcctcaatcttcagctacagggaatgagtaactttgagtggagaagaaacaaacatagtgggtataatcatggatcgcttgtacccctgtgaaaatatattttttaaaaataaaaaaaaaaaa

SEQ ID NO: 8 - protein, 925 aa, Homo sapien [sequence omitted]

SEQ ID NO: 9 - DNA, 2917 bp, Homo sapien
ggaaaaaagcgacttgtggcggtcgagcgtggcgcaggcgaatcctcggcactaagcaaatatggacctcgcggcggcagcggagccgggcgccggcagccagcacctggaggtccgcgacgaggtggccgagaagtgccagaaactgttcctggacttcttggaggagtttcagagcagcgatggagaaattaaatacttgcaattagcagaggaactgattcgtcctgagagaaacacattggttgtgagttttgtggacctggaacaatttaaccagcaactttccaccaccattcaagaggagttctatagagtttacccttacctgtgtcgggccttgaaaacattcgtcaaagaccgtaaagagatccctcttgccaaggatttttatgttgcattccaagacctgcctaccagacacaagattcgagagctcacctcatccagaattggtttgctcactcgcatcagtgggcaggtggtgcggactcacccagttcacccagagcttgtgagcggaacttttctgtgcttggactgtcagacagtgatcagggatgtagaacagcagttcaaatacacacagccaaacatctgccgaaatccagtttgtgccaacaggaggagattcttactggatacaaataaatcaagatttgttgattttcaaaaggttcgtattcaagagacccaagctgagcttcctcgagggagtatcccccgcagtttagaagtaattttaagggctgaagctgtggaatcagctcaagctggtgacaagtgtgactttacagggacactgattgttgtgcctgacgtctccaagcttagcacaccaggagcacgtgcagaaactaattcccgtgtcagtggtgttgatggatatgagacagaaggcattcgaggactccgggcccttggtgttagggacctttcttataggctggtctttcttgcctgctgtgttgcgccaaccaacccaaggtttggggggaaagagctcagagatgaggaacagacagctgagagcattaagaaccaaatgactgtgaaagaatgggagaaagtgtttgagatgagtcaagataaaaatctataccacaatctttgtaccagcctgttccctactatacatggcaatgatgaagtaaaacggggtgtcctgctgatgctctttggtggcgttccaaagacaacaggagaagggacctctcttcgaggggacataaatgtttgcattgttggtgacccaagtacagctaagagccaatttctcaagcacgtggaggagttcagccccagagctgtctacaccagtggtaaagcgtccagtgctgctggcttaacagcagctgttgtgagagatgaagaatctcatgagtttgtcattgaggctggagctttgatgttggctgataatggtgtgtgttgtattgatgaatttgataagatggacgtgcgggatcaagttgctattcatgaagctatggaacagcagaccatatccatcactaaagcaggagtgaaggctactctgaacgcccggacgtccattttggcagcagcaaacccaatcagtggacactatgacagatcaaaatcattgaaacagaatataaatttgtcagctcccatcatgtcccgattcgatctcttctttatccttgtggatgaatgtaatgaggttacagattatgccattgccaggcgcatagtagatttgcattcaagaattgaggaatcaattgatcgtgtctattccctcgatgatatcagaagatatcttctctttgcaagacagtttaaacccaagatttccaaagagtcagaggacttcattgtggagcaatataaacatctccgccagagagatggttctggagtgaccaagtcttcatggaggattacagtgcgacagcttgagagcatgattcgtctctctgaagctatggctcggatgcactgctgtgatgaggtccaacctaaacatgtgaaggaagctttccggttactgaataaatcaatcatccgtgtggaaacacctgatgtcaatctagatcaagaggaagagatccagatggaggtagatgagggtgctggtggcatcaatggtcatgctgacagccctgctcctgtgaacgggatcaatggctacaatgaagacataaatcaagagtctgctcccaaagcctccttaaggctgggcttctctgagtactgccgaatctctaaccttattgtgcttcacctcagaaaggtggaagaagaagaggacgagtcagcattaaagaggagcgagcttgttaactggtacttgaaggaaatcgaatcagagatagactctgaagaagaacttataaataaaaaaagaatcatagagaaagttattcatcgactcacacactatgatcatgttctaattgagctcacccaggctggattgaaaggctccacagagggaagtgagagctatgaagaagatccctacttggtagttaaccctaactacttgctcgaagattgagatagtgaaagtaactgaccagagctgaggaactgtggcacagcacctcgtggcctggagcctggctggagctctgctagggacagaagtgtttctggaagtgatgcttccaggatttgttttcagaaacaagaattgagttgatggtcctatgtgtcacattcatcacaggtttcataccaacacaggcttcagcacttcctttggtgtgtttcctgtcccagtgaagttggaaccaaataatgtgtagtctctataaccaatacctttgttttcatgtgtaagaaaaggcccattacttttaaggtatgtgctgtcctattgagcaaataactttttttcaattgccagctactgcttttattcatcaaaataaaataacttgttctg

SEQ ID NO: 10 - protein, 821 aa, Homo sapien
MDLAAAAEPGAGSQHLEVRDEVAEKCQKLFLDFLEEFQSSDGEIKYLQLAEELIRPERNTLVVSFVDLEQFNQQLSTTIQEEFYRVYPYLCRALKTFVKDRKEIPLAKDFYVAFQDLPTRHKIRELTSSRIGLLTRISGQVVRTHPVHPELVSGTFLCLDCQTVIRDVEQQFKYTQPNICRNPVCANRRRFLLDTNKSRFVDFQKVRIQETQAELPRGSIPRSLEVILRAEAVESAQAGDKCDFTGTLIVVPDVSKLSTPGARAETNSRVSGVDGYETEGIRGLRALGVRDLSYRLVFLACCVAPTNPRFGGKELRDEEQTAESIKNQMTVKEWEKVFEMSQDKNLYHNLCTSLFPTIHGNDEVKRGVLLMLFGGVPKTTGEGTSLRGDINVCIVGDPSTAKSQFLKHVEEFSPRAVYTSGKASSAAGLTAAVVRDEESHEFVIEAGALMLADNGVCCIDEFDKMDVRDQVAIHEAMEQQTISITKAGVKATLNARTSILAAANPISGHYDRSKSLKQNINLSAPIMSRFDLFFILVDECNEVTDYAIARRIVDLHSRIEESIDRVYSLDDIRRYLLFARQFKPKISKESEDFIVEQYKHLRQRDGSGVTKSSWRITVRQLESMIRLSEAMARMHCCDEVQPKHVKEAFRLLNKSIIRVETPDVNLDQEEEIQMEVDEGAGGINGHADSPAPVNGINGYNEDINQESAPKASLRLGFSEYCRISNLIVLHLRKVEEEEDESALKRSELVNWYLKEIESEIDSEEELINKKRIIEKVIHRLTHYDHVLIELTQAGLKGSTEGSESYEEDPYLVVNPNYLLED

SEQ ID NO: 11 - DNA, 2154 bp, Homo sapien
atataaccgcgtggcccgcgcgcgcgcttccctcccggcgcagtcaccggcgcggtctatggctgcgacttctctaatgtctgctttggctgcccggctgctgcagcccgcgcacagctgctcccttcgccttcgccctttccacctcgcggcagttcgaaatgaagctgttgtcatttctggaaggaaactggcccagcagatcaagcaggaagtgcggcaggaggtagaagagtgggtggcctcaggcaacaaacggccacacctgagtgtgatcctggttggcgagaatcctgcaagtcactcctatgtcctcaacaaaaccagggcagctgcagttgtgggaatcaacagtgagacaattatgaaaccagcttcaatttcagaggaagaattgttgaatttaatcaataaactgaataatgatgataatgtagatggcctccttgttcagttgcctcttccagagcatattgatgagagaaggatctgcaatgctgtttctccagacaaggatgttgatggctttcatgtaattaatgtaggacgaatgtgtttggatcagtattccatgttaccggctactccatggggtgtgtgggaaataatcaagcgaactggcattccaaccctagggaagaatgtggttgtggctggaaggtcaaaaaacgttggaatgcccattgcaatgttactgcacacagatggggcgcatgaacgtcccggaggtgatgccactgttacaatatctcatcgatatactcccaaagagcagttgaagaaacatacaattcttgcagatattgtaatatctgctgcaggtattccaaatctgatcacagcagatatgatcaaggaaggagcagcagtcattgatgtgggaataaatagagttcacgatcctgtaactgccaaacccaagttggttggagatgtggattttgaaggagtcagacaaaaagctgggtatatcactccagttcctggaggtgttggccccatgacagtggcaatgctaatgaagaataccattattgctgcaaaaaaggtgctgaggcttgaagagcgagaagtgctgaagtctaaagagcttggggtagccactaattaactactgtgtcttctgtgtcacaaacagcactccaggccagctcaagaagcaaagcaggccaatagaaatgcaatatttttaatttattctactgaaatggtttaaaatgatgccttgtatttattgaaagcttaaatgggtgggtgtttctgcacatacctctgcagtacctcaccagggagcattccagtatcatgcagggtcctgtgatctagccaggagcagccattaacctagtgattaatatgggagacattaccatatggaggatggatgcttcactttgtcaagcacctcagttacacattcgccttttctaggattgcatttcccaagtgctattgcaataacagttgatactcattttaggtaccagaccttttgagttcaactgatcaaaccaaaggaaaagtgttgctagagaaaattggggaaaaggtgaaaaagaaaaaatggtagtaattgagcagaaaaaaattaatttatatatgtattgattggcaaccagatttatctaagtagaactgaattggctaggaaaaaagaaaaactgcatgttaatcattttcctaagctgtccttttgaggcttagtcagtttattgggaaaatgtttaggattattccttgctattagtactcattttatgtatgttacccttcagtaagttctccccattttagttttctaggactgaaaggattcttttctacattatacatgtgtgttgtcatatttggcttttgctatatactttaacttcattgttaaatttttgtattgtatagtttctttggtgtatcttaaaacctatttttgaaaaacaaacttggcttgataatcatttgggcagcttgggtaagtacgcaacttacttttccaccaaagaactgtcagcagctgcctgcttttctgtgatgtatgtatcctgttgacttttccagaaattttttaagagtttgagttactattgaatttaatcagactttctgattaaagggttttctttcttttttaataaaacacatctgtctggtatggta

SEQ ID NO: 12 - protein, 344 aa, Homo sapien
MSALAARLLQPAHSCSLRLRPFHLAAVRNEAVVISGRKLAQQIKQEVRQEVEEWVASGNKRPHLSVILVGENPASHSYVLNKTRAAAVVGINSETIMKPASISEEELLNLINKLNNDDNVDGLLVQLPLPEHIDERRICNAVSPDKDVDGFHVINVGRMCLDQYSMLPATPWGVWEIIKRTGIPTLGKNVVVAGRSKNVGMPIAMLLHTDGAHERPGGDATVTISHRYTPKEQLKKHTILADIVISAAGIPNLITADMIKEGAAVIDVGINRVHDPVTAKPKLVGDVDFEGVRQKAGYITPVPGGVGPMTVAMLMKNTIIAAKKVLRLEEREVLKSKELGVATN

SEQ ID NO: 13 - DNA, 1216 bp, Homo sapien
ggcagctgcacggctcctggccccggagcatgcgcgagagccgccccggagcgccccggagccccccgccgtcccgcccgcggcgtcccgcgccccgccgccagcgcacccccggacgctatggcccacccctccggctggccccttctgtaggatggtagcacacaaccaggtggcagccgacaatgcagtctccacagcagcagagccccgacggcggccagaaccttcctcctcttcctcctcctcgcccgcggcccccgcgcgcccgcggccgtgccccgcggtcccggccccggcccccggcgacacgcacttccgcacattccgttcgcacgccgattaccggcgcatcacgcgcgccagcgcgctcctggacgcctgcggattctactgggggcccctgagcgtgcacggggcgcacgagcggctgcgcgccgagcccgtgggcaccttcctggtgcgcgacagccgccagcggaactgctttttcgcccttagcgtgaagatggcctcgggacccacgagcatccgcgtgcactttcaggccggccgctttcacctggatggcagccgcgagagcttcgactgcctcttcgagctgctggagcactacgtggcggcgccgcgccgcatgctgggggccccgctgcgccagcgccgcgtgcggccgctgcaggagctgtgccgccagcgcatcgtggccaccgtgggccgcgagaacctggctcgcatccccctcaaccccgtcctccgcgactacctgagctccttccccttccagatttgaccggcagcgcccgccgtgcacgcagcattaactgggatgccgtgttattttgttattacttgcctggaaccatgtgggtaccctccccggcctgggttggagggagcggatgggtgtaggggcgaggcgcctcccgccctcggctggagacgaggccgcagaccccttctcacctcttgagggggtcctccccctcctggtgctccctctgggtccccctggttgttgtagcagcttaactgtatctggagccaggacctgaactcgcacctcctacctcttcatgtttacatatacccagtatctttgcacaaaccaggggttgggggagggtctctggctttatttttctgctgtgcagaatcctattttatattttttaaagtcagtttaggtaataaactttattatgaaagtttttttttt

SEQ ID NO: 14 - protein, 211 aa, Homo sapien
MVAHNQVAADNAVSTAAEPRRRPEPSSSSSSSPAAPARPRPCPAVPAPAPGDTHFRTFRSHADYRRITRASALLDACGFYWGPLSVHGAHERLRAEPVGTFLVRDSRQRNCFFALSVKMASGPTSIRVHFQAGRFHLDGSRESFDCLFELLEHYVAAPRRMLGAPLRQRRVRPLQELCRQRIVATVGRENLARIPLNPVLRDYLSSFPFQI

SEQ ID NO: 15 - DNA, 1937 bp, Homo sapien
ggaaactgaaagtgaaatagggagctggctaccagcgttgagttgccctgtaaagccaaaccccctaaaggtctccacactgctgtttaacggcacacttgacaatggcttcagcagcacgcttgacaatgatgtgggaggaggtcacatgccctatctgcctggaccccttcgtggagcctgtgagcatcgagtgtggccacagcttctgccaggaatgcatctctcaggttgggaaaggtgggggcagcgtctgtcctgtgtgccggcagcgctttctgctcaagaatctccggcccaatcgacagctagccaacatggtgaacaaccttaaagaaatcagccaggaggccagagagggcacacagggggaacggtgtgcagtgcatggagagagacttcacctgttctgtgagaaagatgggaaggccctttgctgggtatgtgcccagtctcggaaacaccgtgaccacgccatggtccctcttgaggaggctgcacaggagtaccaggagaagctccaggtggcattaggggaactgagaagaaagcaggagttggctgagaagttggaagtggaaattgcaataaagagagcagactggaagaaaacagtggaaacacagaaatctaggattcacgcagagtttgtgcagcaaaaaaacttcctggttgaagaagaacagaggcagctgcaggagctggagaaggatgagagggagcagctgagaatcctgggggagaaagaggccaagctggcccagcagagccaggccctacaggagctcatctcagagctagatcgaaggtgccacagctcagcactggaactgctgcaggaggtgataattgtcctggaaaggagtgagtcctggaacctgaaggacctggatattacctctccagaactcaggagtgtgtgccatgtgccagggctgaagaagatgctgaggacatgtgcagtccacatcactctggatccagacacagccaatccgtggctgatactttcagaagatcggagacaagtgaggcttggagacacccagcagagcatacctggaaatgaagagagatttgatagttatcctatggtcctgggtgcccagcactttcactctggaaaacattactgggaggtagatgtgacaggaaaggaggcctgggacctgggtgtctgcagagactctgtgcgcaggaaggggcactttttgcttagttccaagagtggcttctggacaatttggttgtggaacaaacaaaaatatgaggctggcacctacccccagactcccctccaccttcaggtgcctccatgccaagttgggattttcctggactatgaggctggcatggtctccttctacaacatcactgaccatggctccctcatctactccttctctgaatgtgcctttacaggacctctgcggcccttcttcagtcctggtttcaatgatggaggaaaaaacacagcccctctaaccctctgtccactgaatattggatcacaaggatccactgactattgatggctttctctggacactgccactctccccattggcaccgcttctcagccacaaaccctgcctcttttccccatgaactctgaaccacctttgtctctgcagaggcatccggatcccagcaagcgagctttagcagggaagtcacttcaccatcaacattcctgccccagatggctttgtgattccctccagtgaagcagcctccttatatttggcccaaactcatcttgatcaaccaaaaacatgtttctgccttctttatgggacttaagttttttttttctcctctccatctctaggatgtcgtctttggtgagatctctattatatcttgtatggtttgcaaaagggcttcctaaaaataaaaaataaaatttaaaaaactgtgaaaaaaaaaaaaaaaaa

SEQ ID NO: 16 - protein, 475 aa, Homo sapien [sequence omitted]

SEQ ID NO: 17 - DNA, 2828 bp, Homo sapien
cctcggttccgcggcgcaccggagggcagcatgtcgcggcggcggcacagcgacgagaacgacggtgggcagcctcacaaaaggagaaagacctctgatgcaaatgaaactgaagatcatttggaatctttaatatgtaaagtaggagaaaagagtgcctgctctttggagagcaacctagaaggcttggctggtgttttggaagctgatcttcctaactacaagagcaagatcttaaggcttctttgtacagttgcacgcctattacctgagaagctgacaatttatacaacattagttggactactgaatgccaggaattacaattttggtggagaatttgtagaagccatgattcgtcaacttaaagaatcattgaaagcaaacaattataatgaagccgtgtatttggtccgttttttatctgatcttgtgaattgtcatgtgattgccgccccatcaatggttgctatgtttgaaaattttgtaagcgtaactcaggaagaagatgtacctcaggtgcgacgagattggtatgtgtatgcatttctgtcatctttgccctgggttggaaaggagttgtacgaaaagaaagatgcagagatggaccgcatctttgccaacactgaaagctatcttaaaagacgccaaaagactcatgtacccatgttacaggtatggactgctgataaaccacatccacaagaagagtatttagattgcctgtgggcccagattcagaaattgaaaaaggatcgctggcaggaacggcacatcctaagaccttatcttgcctttgacagcatcctgtgtgaagcactgcagcacaatctgcctccttttacaccacctcctcacactgaagattcagtgtacccaatgccaagggtcatcttcagaatgtttgattacacagatgatcccgagggtcctgtcatgccagggagtcattcagtggaaagatttgtaatagaagagaatcttcactgcatcattaagtcccactggaaggaaaggaagacttgtgctgcacagttagtgagctatccagggaagaacaagatccccttgaactaccacatagttgaggtgatctttgcagagctgtttcaacttccagcaccccctcacattgatgtgatgtacacaacactcctcattgaactgtgcaaacttcaacctggctctctaccccaagttcttgcacaggcaactgaaatgctatacatgcgtttggacacaatgaacactacctgtgtagacaggtttattaattggttttctcatcatctaagtaacttccagttccgttggagctgggaagattggtcagattgtcttagtcaagatcctgaaagtcccaaaccgaagtttgtaagagaagttctagaaaaatgtatgaggttgtcttaccatcagcgtatattagatattgttcctcctaccttctcagctctgtgtcctgcaaacccaacctgcatttacaagtatggagatgaaagtagcaattctcttcctggacattctgttgccctctgtttagctgttgcctttaaaagtaaggcaaccaatgatgaaatcttcagcattctgaaagatgtaccaaatcctaaccaggatgatgacgacgatgaaggattcagttttaacccattgaaaatagaagtctttgtacagactctgctacacttggcagccaaatcattcagccactccttcagtgctcttgcaaagtttcatgaagtcttcaaaaccctagctgaaagtgatgaaggaaagttacatgtgctaagagttatgtttgaggtctggaggaaccatccacagatgattgctgtactagtggataagatgattcgtacacaaatagttgattgtgctgccgtagcaaattggatcttctcttcagaactatctcgtgactttaccagattgtttgtttgggaaattttgcactctacaattcgtaagatgaacaaacatgtcctgaagatccagaaagagctggaagaagctaaagagaaacttgctaggcaacacaaacggcgaagtgatgatgacgacagaagcagtgacaggaaagacggggttcttgaggaacaaatagaacgacttcaggaaaaagtggaatctgctcagagtgaacaaaagaatcttttcctcgttatatttcagcggtttatcatgatcttgaccgagcacctagtacgatgcgaaactgatgggaccagtgtattaacaccatggtataagaactgtatagagaggctgcagcagatcttcctacagcatcaccaaataatccagcagtacatggtgaccctggagaaccttctcttcactgctgaattagaccctcatatcttggccgtgttccagcagttctgtgccctgcaggcctaagggtcattttttcctcatgtcaaggttttttttgatatcttaaaataatttgtcttattttttgatggtttgaatgcttgctttcttgtagtatcctttcacttcttaaaggaaacaaaggggaagaggacagtgaatgaacatggcattacttttaattgccctgaaaagcaaatacttcctaacggcagtaatgtgactatgaccatgatatattatatatgtgacagatacaaattctctgtgatcagtttgttattttttttctccttaaggcaacaaaataattggtttgaggtatgtgaaacactagaggtcaaccttacatagtatatagaactgatgggtttacccagctacccagtagcataacttttcacagctcggggatgaattaacatggctgaaataaaactaaaagtatg

SEQ ID NO: 18 - protein, 790 aa, Homo sapien
MSRRRHSDENDGGQPHKRRKTSDANETEDHLESLICKVGEKSACSLESNLEGLAGVLEADLPNYKSKILRLLCTVARLLPEKLTIYTTLVGLLNARNYNFGGEFVEAMIRQLKESLKANNYNEAVYLVRFLSDLVNCHVIAAPSMVAMFENFVSVTQEEDVPQVRRDWYVYAFLSSLPWVGKELYEKKDAEMDRIFANTESYLKRRQKTHVPMLQVWTADKPHPQEEYLDCLWAQIQKLKKDRWQERHILRPYLAFDSILCEALQHNLPPFTPPPHTEDSVYPMPRVIFRMFDYTDDPEGPVMPGSHSVERFVIEENLHCIIKSHWKERKTCAAQLVSYPGKNKIPLNYHIVEVIFAELFQLPAPPHIDVMYTTLLIELCKLQPGSLPQVLAQATEMLYMRLDTMNTTCVDRFINWFSHHLSNFQFRWSWEDWSDCLSQDPESPKPKFVREVLEKCMRLSYHQRILDIVPPTFSALCPANPTCIYKYGDESSNSLPGHSVALCLAVAFKSKATNDEIFSILKDVPNPNQDDDDDEGFSFNPLKIEVFVQTLLHLAAKSFSHSFSALAKFHEVFKTLAESDEGKLHVLRVMFEVWRNHPQMIAVLVDKMIRTQIVDCAAVANWIFSSELSRDFTRLFVWEILHSTIRKMNKHVLKIQKELEEAKEKLARQHKRRSDDDDRSSDRKDGVLEEQIERLQEKVESAQSEQKNLFLVIFQRFIMILTEHLVRCETDGTSVLTPWYKNCIERLQQIFLQHHQIIQQYMVTLENLLFTAELDPHILAVFQQFCALQA

SEQ ID NO: 19 - DNA, 1585 bp, Homo sapien
cacaccctgacaagctgccaggcaggttctcttcctctcacatactgacccacggctccaccctctctcccctggaaaggacaccatgagcactgaaagcatgatccgggacgtggagctggccgaggaggcgctccccaagaagacaggggggccccagggctccaggcggtgcttgttcctcagcctcttctccttcctgatcgtggcaggcgccaccacgctcttctgcctgctgcactttggagtgatcggcccccagagggaagagtcccccagggacctctctctaatcagccctctggcccaggcagtcagatcatcttctcgaaccccgagtgacaagcctgtagcccatgttgtagcaaaccctcaagctgaggggcagctccagtggctgaaccgccgggccaatgccctcctggccaatggcgtggagctgagagataaccagctggtggtgccatcagagggcctgtacctcatctactcccaggtcctcttcaagggccaaggctgcccctccacccatgtgctcctcacccacaccatcagccgcatcgccgtctcctaccagaccaaggtcaacctcctctctgccatcaagagcccctgccagagggagaccccagagggggctgaggccaagccctggtatgagcccatctatctgggaggggtcttccagctggagaagggtgaccgactcagcgctgagatcaatcggcccgactatctcgactttgccgagtctgggcaggtctactttgggatcattgccctgtgaggaggacgaacatccaaccttcccaaacgcctcccctgccccaatccctttattaccccctccttcagacaccctcaacctcttctggctcaaaaagagaattgggggcttagggtcggaacccaagcttagaactttaagcaacaagaccaccacttcgaaacctgggattcaggaatgtgtggcctgcacagtgaagtgctggcaaccactaagaattcaaactggggcctccagaactcactggggcctacagctttgatccctgacatctggaatctggagaccagggagcctttggttctggccagaatgctgcaggacttgagaagacctcacctagaaattgacacaagtggaccttaggccttcctctctccagatgtttccagacttccttgagacacggagcccagccctccccatggagccagctccctctatttatgtttgcacttgtgattatttattatttatttattatttatttatttacagatgaatgtatttatttgggagaccggggtatcctgggggacccaatgtaggagctgccttggctcagacatgttttccgtgaaaacggaggctgaacaataggctgttcccatgtagccccctggcctctgtgccttcttttgattatgttttttaaaatattatctgattaagttgtctaaacaatgctgatttggtgaccaactgtcactcattgctgaggcctctgctccccagggagttgtgtctgtaatcggcctactattcagtggcgagaaataaaggttgcttaggaaagaa

SEQ ID NO: 20 - protein, 233 aa, Homo sapien [sequence omitted]

SEQ ID NO: 21 - DNA, 2460 bp, Homo sapien
ggtcccaaggctttccagagcgaacctgtgcggctgcaggcaccggcgtgttgagtttccggcgttccgaaggactgagctcttgtcgcggatcccgtccgccgtttccagcccccagtctcagagcggagcccacagagcagggcaccggcatggccaaagccgcggcgatcggcatcgacctgggcaccacctactcctgcgtgggggtgttccaacacggcaaggtggagatcatcgccaacgaccagggcaaccgcaccacccccagctacgtggccttcacggacaccgagcggctcatcggggatgcggccaagaaccaggtggcgctgaacccgcagaacaccgtgtttgacgcgaagcggctgatcggccgcaagttcggcgacccggtggtgcagtcggacatgaagcactggcctttccaggtgatcaacgacggagacaagcccaaggtgcaggtgagctacaagggggagaccaaggcattctaccccgaggagatctcgtccatggtgctgaccaagatgaaggagatcgccgaggcgtacctgggctacccggtgaccaacgcggtgatcaccgtgccggcctacttcaacgactcgcagcgccaggccaccaaggatgcgggtgtgatcgcggggctcaacgtgctgcggatcatcaacgagcccacggccgccgccatcgcctacggcctggacagaacgggcaagggggagcgcaacgtgctcatctttgacctgggcgggggcaccttcgacgtgtccatcctgacgatcgacgacggcatcttcgaggtgaaggccacggccggggacacccacctgggtggggaggactttgacaacaggctggtgaaccacttcgtggaggagttcaagagaaaacacaagaaggacatcagccagaacaagcgagccgtgaggcggctgcgcaccgcctgcgagagggccaagaggaccctgtcgtccagcacccaggccagcctggagatcgactccctgtttgagggcatcgacttctacacgtccatcaccagggcgaggttcgaggagctgtgctccgacctgttccgaagcaccctggagcccgtggagaaggctctgcgcgacgccaagctggacaaggcccagattcacgacctggtcctggtcgggggctccacccgcatccccaaggtgcagaagctgctgcaggacttcttcaacgggcgcgacctgaacaagagcatcaaccccgacgaggctgtggcctacggggcggcggtgcaggcggccatcctgatgggggacaagtccgagaacgtgcaggacctgctgctgctggacgtggctcccctgtcgctggggctggagacggccggaggcgtgatgactgccctgatcaagcgcaactccaccatccccaccaagcagacgcagatcttcaccacctactccgacaaccaacccggggtgctgatccaggtgtacgagggcgagagggccatgacgaaagacaacaatctgttggggcgcttcgagctgagcggcatccctccggcccccaggggcgtgccccagatcgaggtgaccttcgacatcgatgccaacggcatcctgaacgtcacggccacggacaagagcaccggcaaggccagcaagatcaccatcaccaacgacaagggccgcctgagcaaggaggagatcgagcgcatggtgcaggaggcggagaagtacaaagcggaggacgaggtgcagcgcgagagggtgtcagccaagaacgccctggagtcctacgccttcaacatgaagagcgccgtggaggatgaggggctcaagggcaagatcagcgaggcggacaagaagaaggttctggacaagtgtcaagaggtcatctcgtggctggacgccaacaccttggccgagaaggacgagtttgagcacaagaggaaggagctggagcaggtgtgtaaccccatcatcagcggactgtaccagggtgccggtggtcccgggcctgggggcttcggggctcagggtcccaagggagggtctgggtcaggccctaccattgaggaggtggattaggggcctttgttctttagtatgtttgtctttgaggtggactgttgggactcaaggactttgctgctgttttcctatgtcatttctgcttcagctctttgctgcttcacttctttgtaaagttaagttgtaacctgatggtaattagctggcttcattatttttgtagtacaaccgatatgttcattagaattctttgcatttaatgttgatactgtaagggtgtttcgttccctttaaatgaatcaacactgccaccttctgtacgagtttgtttttttttttttttttttttttttttgcttggcgaaaacactacaaaggctgggaatgtatgtttttataatttgtttatttaaatatgaaaaataaaatgttaaacttt

SEQ ID NO: 22 - protein, 641 aa, Homo sapien
MAKAAAIGIDLGTTYSCVGVFQHGKVEIIANDQGNRTTPSYVAFTDTERLIGDAAKNQVALNPQNTVFDAKRLIGRKFGDPVVQSDMKHWPFQVINDGDKPKVQVSYKGETKAFYPEEISSMVLTKMKEIAEAYLGYPVTNAVITVPAYFNDSQRQATKDAGVIAGLNVLRIINEPTAAAIAYGLDRTGKGERNVLIFDLGGGTFDVSILTIDDGIFEVKATAGDTHLGGEDFDNRLVNHFVEEFKRKHKKDISQNKRAVRRLRTACERAKRTLSSSTQASLEIDSLFEGIDFYTSITRARFEELCSDLFRSTLEPVEKALRDAKLDKAQIHDLVLVGGSTRIPKVQKLLQDFFNGRDLNKSINPDEAVAYGAAVQAAILMGDKSENVQDLLLLDVAPLSLGLETAGGVMTALIKRNSTIPTKQTQIFTTYSDNQPGVLIQVYEGERAMTKDNNLLGRFELSGIPPAPRGVPQIEVTFDIDANGILNVTATDKSTGKASKITITNDKGRLSKEEIERMVQEAEKYKAEDEVQRERVSAKNALESYAFNMKSAVEDEGLKGKISEADKKKVLDKCQEVISWLDANTLAEKDEFEHKRKELEQVCNPIISGLYQGAGGPGPGGFGAQGPKGGSGSGPTIEEVD

SEQ ID NO: 23 - DNA, 2506 bp, Homo sapien
gttcggtggcccataggggaagatggcggctgctcctttggaggagcgggattgagaggatcggggtggggagaccaaacaagagagacatttctggctctgaaggcgaacgcttcgctggccatttaggagctctgctcaaagccagacgtatcctagaaggaaaacatcaccatggctacagaaattggttctcctcctcgttttttccatatgccaaggttccagcaccaggcacctcgacagctgttttataagcgacctgattttgcacaacagcaagcaatgcaacagcttacttttgatggaaaacgaatgagaaaagctgtgaaccgaaaaaccatagactacaatccatctgtaattaagtatttggagaacagaatatggcaaagagaccagagagatatgcgggcaattcagcctgatgcaggttattacaatgatctggtcccacctataggaatgttgaataatcctatgaatgcagtaacaacaaaatttgttcggacatcaacaaataaagtaaagtgtcctgtatttgttgttaggtggactccagaaggaagacgcttggtcactggagcttctagtggggagtttaccctgtggaatggactcactttcaattttgaaacaatattacaggctcacgacagcccagtgagggccatgacgtggtcacataatgacatgtggatgttgacagcagaccacggaggatatgtgaaatattggcagtcgaacatgaacaacgtcaagatgttccaggcacataaggaggcgattagagaggccaggtttatacacaatataccattttctgtagtccctattgtcatggttaaattattctctaagtgtattctgggtgcagagatgcatgggctctgtcagtttctgggaaactttctgcaccctataaacacaatatttttctttgttttcacacattcaccattttgctggcacctttctgaagtagtgttgtcccggtatcagcctttgcaatatgttagagatgtactgtctgccgcattttgcactggttttctcttttcatttatgattaataatgtgtatacgttattcctttttattatctactgtgtaagacaagaatatttcattccaaataaagaattcagtctttaattatgcaactgaataaaatctaaagcctacagaaaacaacttcagaattcacacaaagtggaaaaaggcttaagtgaagacctggttggcttggttatgccacgacttccaaaggaaagtataggactaaaaccctcacagataactggatgtggcaaacattaacggagtaatgaatgggttcttcaagctttgcagctgtaagcagatcattgtcaagaagactctaggacttttcttctgattcactgttgataacatcacttatgcaaatgtatacaataagtggagtttaaaatattttcagtgagttgtatatttttacacatcagtgaggtatgtatagtaaaactgggggaaaaagttccaaatacaagcctgaagaattgctgcagcctcagaataaagctaagcagcattctttaaggttgtgccacccatgtgtgggaggaggttgacatctttatggaaacatcatccactgtagtcatttgttcatactttcagaatcttaacagaaattgttggatgaacatgcttctgctttgtagattttgccttagtgtcatgcccatacattgagtttacacagctggtccttcataggattccaaagttcaagggagtttttagagttagttgagaaacttgatgatctttcactgctgggaaaaactgactccttcttgcagcagattctttggctttacacacaagtctgaatgtccttattttaaagttttcctcaaaggtgcaacattcatggaatagcttgccaggaagatgtgaaacttttctacagacctttgaaatggatgagaaacattgtatgtagggatgtttagcaatcagtcttttaatagacagcccacattgtttcagcttatttcatgaagtgtctgaggcagaagctgatgataattttgggagcagtattcgtgtgtgatttaaaagactgcaggaatactgcaaaaatagaatccatttattttcaccacttaaggcagcttcatgtgatttcctcgtatcatagaaaatagagaaggaacatggatagcattagcactaataatacacacttgaagttctcagaatactgatgattgaaaactcaaacaactgctctgttgaagtcttcttttgatgagatgcctatgttagctgacgacattcactttaagggcttcttcactggattcttccctctcctgtttataatgcagcacagtgtttttatttttccctgtctgagaagcacagattatctgttaaatgctgacttctttcccctgctgtgtgtcttcatgtaacagtttctcacccacggataataaatttgctacatgctctg

SEQ ID NO: 24 - protein, 326 aa, Homo sapien
MATEIGSPPRFFHMPRFQHQAPRQLFYKRPDFAQQQAMQQLTFDGKRMRKAVNRKTIDYNPSVIKYLENRIWQRDQRDMRAIQPDAGYYNDLVPPIGMLNNPMNAVTTKFVRTSTNKVKCPVFVVRWTPEGRRLVTGASSGEFTLWNGLTFNFETILQAHDSPVRAMTWSHNDMWMLTADHGGYVKYWQSNMNNVKMFQAHKEAIREARFIHNIPFSVVPIVMVKLFSKCILGAEMHGLCQFLGNFLHPINTIFFFVFTHSPFCWHLSEVVLSRYQPLQYVRDVLSAAFCTGFLFSFMINNVYTLFLFIIYCVRQEYFIPNKEFSL

SEQ ID NO: 25 - DNA, 979 bp, Rattus norvegicus
cggtgcctggtgcgggagctacggggcccagggattgtgtttaaagtagtgcttctaccaacatgtcccgtggttccagcgccggttttgaccgccacattaccattttttcacccgagggtcggctctaccaagtagaatatgcttttaaggctattaaccagggtggccttacatcagtagctgtcagagggaaagactgtgcagtaattgtcacacagaagaaagtacctgacaaattattggattccagcacagtgactcacttattcaagataactgaaaacattggttgtgtgatgaccggaatgacagctgacagcagatcccaggtacagagggcacgctatgaggcagctaactggaaatacaagtatggctatgagattcctgtggacatgctgtgtaaaagaattgccgatatttctcaggtctacacacagaatgctgaaatgaggcctcttggttgttgtatgattttaattggtatagatgaagagcaaggccctcaggtatataagtgtgatcctgcaggttactactgtgggtttaaagccactgcagcgggagttaaacaaactgagtcaaccagcttccttgaaaaaaaagtgaagaagaaatttgattggacatttgaacagacagtggaaactgcaattacatgcctgtctactgttctatcaattgatttcaaaccttcagaaatagaagttggagtagtgacagttgaaaatcctaaattcaggattcttacagaagcagagattgatgctcaccttgttgctctagcagagagagactaaacattgtcgttagtttaccagatccgtgatgccacttacctgtgtgtttggtaacaacaaacaaacatcatggaggtccctggattgaaaaaggagcctctcccactcctcctaccaccgaagtggttaggactctatataaataaaaacaaggcttttggaaaaaaaaaaaaaaa

SEQ ID NO: 26 - protein, 246 aa, Rattus norvegicus
MSRGSSAGFDRHITIFSPEGRLYQVEYAFKAINQGGLTSVAVRGKDCAVIVTQKKVPDKLLDSSTVTHLFKITENIGCVMTGMTADSRSQVQRARYEAANWKYKYGYEIPVDMLCKRIADISQVYTQNAEMRPLGCCMILIGIDEEQGPQVYKCDPAGYYCGFKATAAGVKQTESTSFLEKKVKKKFDWTFEQTVETAITCLSTVLSIDFKPSEIEVGVVTVENPKFRILTEAEIDAHLVALAERD

SEQ ID NO: 27 - DNA, 931 bp, Homo sapien
caggggcgtgcagcccgcttgccaatcagagcgcggctgagcggccccgcagccaacccccgaggagcggccggctggcgtccgccgcgcccaggagttggggatgtcctacaaacccatcgcccctgctcccagcagcacccctggctccagcacccctgggccgggcaccccggtccctacaggaagcgtcccgtcgccgtcgggctcagtgccaggagccggcgctcctttcagaccgctgtttaacgactttggaccgccttccatgggctacgtgcaggcgatgaagccacccggcgcccagggctcccagagcacctacacggacctgctgtcagtcatagaggagatgggcaaagagatccggcctacctatgctggcagcaagagcgccatggagcgcctgaagagaggtatcatccatgcccgggccctagtcagagagtgcctggcagagacagagcggaacgcccgcacgtaacaggaagcgcctcggcctcagcgtctggacctatccggccactgcagagcacccgcttctccctggccttcatcccgagttgcactaaccatcctgggcttcctgtcctgtgtcccttggtgggtcccctccaggaaccaaggagtggccctccaggtggcagcactaaggacacccccccacaacaagagttagcagcgaggtccccatgagtcccacccatgacctgccgacagtgttgcccaccggaacttttgtggcccctaccgctcagcccttcccagcacttctcccactttgtcccgagcctccttctcgcccagcaggggcacaggcctggcacctccctgccttgtgtcctgagccatagtgactcttttatctgtgtgtcttttgctaaatatgccctttttatattaataaaagatgatttggagttgtgctctc

SEQ ID NO: 28 - protein, 126 aa, Homo sapien
MSYKPIAPAPSSTPGSSTPGPGTPVPTGSVPSPSGSVPGAGAPFRPLFNDFGPPSMGYVQAMKPPGAQGSQSTYTDLLSVIEEMGKEIRPTYAGSKSAMERLKRGIIHARALVRECLAETERNART

SEQ ID NO: 29 - DNA, 2155 bp, Homo sapien
gcgcctttgtcctacggcgggcaggtgggccgacgcggaggcggcagcggcgggcctgaggcgaaggagcggccgggagcccgccgcgctggtagcgatattaataaggcagcggaaagaagaaatatgaatacggctccatcaagacccagccccacacgaagggatccatatggctttggagacagtcgagattcaaggcgtgatcgatccccaattcgaggaagtccaaggagagagcccagggatggcagaaatggccgggatgcccgggacagcagagacattcgagacccccgagacttgcgggaccacagacatagtagagatttgcgggatcacagagacagcaggagtgtgcgcgacgttcgggacgtgagggatcttagagactttcgtgatctaagagactctagggattttcgagatcagcgagaccccatgtacgacagatacagagacatgagagactcccgagatcctatgtacaggagagaaggctcttatgaccgatacctacgaatggatgactattgcaggagaaaggatgactcttattttgaccgttacagagatagctttgatggacggggccctccaggcccagaaagtcagtctcgtgcaaaagagcgtttgaaacgtgaggaacggcgtagagaagagctttatcgtcaatattttgaggaaatccagagacgctttgatgccgaaaggcccgttgattgttctgtgattgtggtcaacaaacagacaaaagactatgctgagtctgtggggcggaaggtgcgagacctgggcatggtagtggacttgatcttccttaacacagaagtgtcactgtcacaagccttggaggatgttagcaggggaggttctccttttgctattgtcatcacccagcaacaccagattcaccgctcctgcacagtcaacatcatgtttggaaccccgcaagagcatcgcaacatgccccaagcagatgccatggtgctggtggccagaaattatgagcgttacaagaatgagtgccgggagaaggaacgtgaggagattgccagacaggcagccaagatggccgatgaagccatcctgcaggaaagagagagaggaggccctgaggagggagtgcgtgggggccaccctccagccatccagagcctcatcaacctgctggcagacaacaggtacctcactgctgaagagactgacaagatcatcaactacctgcgagagcggaaggagcggctgatgaggagcagcaccgactctctgcctggcccgatttcccgccaaccactcggggcgacctcgggtgcctcgctgaagacacagccaagctcccaaccgctccagagcggccaagtgctcccctctgctacacccactccatctgcaccccccacctcccagcaagagcttcaggccaaaatcctcagcctcttcaatagtggcacagtgacggccaatagcagctctgcatccccctcggttgctgccggaaacaccccaaaccagaatttttccacagcagcaaacagccagcctcaacaaagatcacaggcttctggcaatcagcctccaagcattttgggacagggaggatctgctcagaacatgggccccagacctggggctccttcccaagggctttttggccagccttccagtcgcctggcacctgctagcaacatgactagccagaggcctgtgtcttccacaggtatcaactttgacaatccaagtgtacagaaggctctggataccctgatccagagtggccctgctctctcccacctggttagccagaccacagcacagatggggcagccacaggcccccatgggatcttaccagaggcattactgaagctaaatctttcaactctccccagtcccctctcccctggcctcctcccacttacttgttctaaatagagctgtttgagatgttctctgcgctcccaggccggcatcgagtgtcatcaatttctaccacctgctctctcttctgcccaaggctgtgttgcttattccttacaaagtttatactgcatttggggctgtatctttttttgttttgtttttttttttttcctctttggaactcttgtgttgttaataaaatgaaatgattactttttaattaaaatgtcgac

SEQ ID NO: 30 - protein, 621 aa, Homo sapien
APLSYGGQVGRRGGGSGGPEAKERPGARRAGSDINKAAERRNMNTAPSRPSPTRRDPYGFGDSRDSRRDRSPIRGSPRREPRDGRNGRDARDSRDIRDPRDLRDHRHSRDLRDHRDSRSVRDVRDVRDLRDFRDLRDSRDFRDQRDPMYDRYRDMRDSRDPMYRREGSYDRYLRMDDYCRRKDDSYFDRYRDSFDGRGPPGPESQSRAKERLKREERRREELYRQYFEEIQRRFDAERPVDCSVIVVNKQTKDYAESVGRKVRDLGMVVDLIFLNTEVSLSQALEDVSRGGSPFAIVITQQHQIHRSCTVNIMFGTPQEHRNMPQADAMVLVARNYERYKNECREKEREEIARQAAKMADEAILQERERGGPEEGVRGGHPPAIQSLINLLADNRYLTAEETDKIINYLRERKERLMRSSTDSLPGPISRQPLGATSGASLKTQPSSQPLQSGQVLPSATPTPSAPPTSQQELQAKILSLFNSGTVTANSSSASPSVAAGNTPNQNFSTAANSQPQQRSQASGNQPPSILGQGGSAQNMGPRPGAPSQGLFGQPSSRLAPASNMTSQRPVSSTGINFDNPSVQKALDTLIQSGPALSHLVSQTTAQMGQPQAPMGSYQRHY

SEQ ID NO: 31 - DNA, 2004 bp, Homo sapien
aacaataggaaacgtcaaaattgggatagtcggcagttctggcccctgcagctggaggtaccctgagttctgagggtcgtagtgctgtttctggtattctcatcgcggtcacctctaccggtgtggacaagtaaagtttgaatcagcttctccatggcctgggcaccagttcccggctgagccattttccttttggctaaaagtccccgcccagaggccaattcgtcgcggcggcggtggagatcgcaggtcgctcaggcttgcagatgggtcaagggttgtggagagtggtcagaaaccagcagctgcaacaagaaggctacagtgagcaaggctacctcaccagagagcagagcaggagaatggctgcgagcaacatttctaacaccaatcatcgtaaacaagtccaaggaggcattgacatatatcatcttttgaaggcaaggaaatcgaaagaacaggaaggattcattaatttggaaatgttgcctcctgagctaagctttaccatcttgtcctacctgaatgcaactgacctttgcttggcttcatgtgtttggcaggaccttgcgaatgatgaacttctctggcaagggttgtgcaaatccacttggggtcactggtccatatacaataagaacccacctttaggattttcttttagaaaagtgtatatgcagctggatgaaggcagcctcacctttaatgccaacccagatgagggagtgaactactttatgtccaagggtatcctggatgattcgccaaaggaaatagcaaagtttatcttctgtacaagaacactaaattggaaaaaactgagaatctatcttgatgaaaggagagatgtcttggatgaccttgtaacattgcataattttagaaatcagttcttgccaaatgcactgagagaattttttcgtcatatccatgcccctgaagagcgtggagagtatcttgaaactcttataacaaagttctcacatagattctgtgcttgcaaccctgatttaatgcgagaacttggccttagtcctgatgctgtctatgtactgtgctactctttgattctactttccattgacctcactagccctcatgtgaagaataaaatgtcaaaaagggaatttattcgaaatacccgtcgcgctgctcaaaatattagtgaagattttgtagggcatctttatgacaatatctaccttattggccatgtggctgcataaaaagcacaattgctaggacttcagtttttacttcagactaaagctacccaaggacttagcagatatgggggttacatcagtgctggtcattgtagcctgagtatacaatcaagcttcagtgtgcaacctttttttcttttgccattttctattttagtaatttccttggggaactaaataattttgcagaatttttcctaattttgtttatcacgttttgcacaaagcagagccactgtctaacacagctgttaacgaatgataaactgacattatactctaaaagatggtgtatttgtgcattagatttgcctgaaaaactttatccatttccattctttatacaaataccatgtaatgtgtacatatttaactaaagagatttatagtcataattattttattgtaaagattttaactaaagtttttccttttctctcaaactgagttctgaaatttatttgattctgatctgaaactattgtcttcgtaaaagttagatctgacttcagacagaaaccaataccagcttccttttcctttaaactttgaagagtgttgatttgttactatattactatgcaaaactggcagttatttttataatataaatttataatttgattttttattttaaaaactgggttaatcaagtctcggtaagtcctttaaaccatttaggatttttaaaacatcaaaatttatgatttacattcataggaataaaataaaatattattagaactctggtaaaaaaaaaaaaaaaaaaaaaaaaaaa

SEQ ID NO: 32 - protein, 319 aa, Homo sapien
MGQGLWRVVRNQQLQQEGYSEQGYLTREQSRRMAASNISNTNHRKQVQGGIDIYHLLKARKSKEQEGFINLEMLPPELSFTILSYLNATDLCLASCVWQDLANDELLWQGLCKSTWGHWSIYNKNPPLGFSFRKVYMQLDEGSLTFNANPDEGVNYFMSKGILDDSPKEIAKFIFCTRTLNWKKLRIYLDERRDVLDDLVTLHNFRNQFLPNALREFFRHIHAPEERGEYLETLITKFSHRFCACNPDLMRELGLSPDAVYVLCYSLILLSIDLTSPHVKNKMSKREFIRNTRRAAQNISEDFVGHLYDNIYLIGHVAA

SEQ ID NO: 33 - DNA, 960 bp, Homo sapien
agcagctccaaccagggcagccttcctgagaagatgcaaccaatcctgcttctgctggccttcctcctgctgcccagggcagatgcaggggagatcatcgggggacatgaggccaagccccactcccgcccctacatggcttatcttatgatctgggatcagaagtctctgaagaggtgcggtggcttcctgatacaagacgacttcgtgctgacagctgctcactgttggggaagctccataaatgtcaccttgggggcccacaatatcaaagaacaggagccgacccagcagtttatccctgtgaaaagacccatcccccatccagcctataatcctaagaacttctccaacgacatcatgctactgcagctggagagaaaggccaagcggaccagagctgtgcagcccctcaggctacctagcaacaaggcccaggtgaagccagggcagacatgcagtgtggccggctgggggcagacggcccccctgggaaaacactcacacacactacaagaggtgaagatgacagtgcaggaagatcgaaagtgcgaatctgacttacgccattattacgacagtaccattgagttgtgcgtgggggacccagagattaaaaagacttcctttaagggggactctggaggccctcttgtgtgtaacaaggtggcccagggcattgtctcctatggacgaaacaatggcatgcctccacgagcctgcaccaaagtctcaagctttgtacactggataaagaaaaccatgaaacgctactaactacaggaagcaaactaagcccccgctgtaatgaaacaccttctctggagccaagtccagatttacactgggagaggtgccagcaactgaataaatacctctcccagtgtaaatctggagccaagtccagatttacactgggagaggtgccagcaactgaataaatacctcttagctgagtgg

SEQ ID NO: 34 - protein, 247 aa, Homo sapien
MQPILLLLAFLLLPRADAGEIIGGHEAKPHSRPYMAYLMIWDQKSLKRCGGFLIQDDFVLTAAHCWGSSINVTLGAHNIKEQEPTQQFIPVKRPIPHPAYNPKNFSNDIMLLQLERKAKRTRAVQPLRLPSNKAQVKPGQTCSVAGWGQTAPLGKHSHTLQEVKMTVQEDRKCESDLRHYYDSTIELCVGDPEIKKTSFKGDSGGPLVCNKVAQGIVSYGRNNGMPPRACTKVSSFVHWIKKTMKRY

SEQ ID NO: 35 - DNA, 5123 bp, Homo sapien
atttccatcaaccatgatgaaagtctgctgcctgagtccttagagagcatgatgtatggtaagaaggtgctcagccaagaaccaagctcttttcaggagagcccaagtaccaatactgaatctagaaaagatgttattaccatctcaataagcaaagatgggaactgccagtctggtggccctgaggcagaaatagcttctggccctacttttatgggtagcttagaagcaggaggagtagctcaagcaaacatcaaaaatggaaaacatttgttgatgtctatttcaaaggaaggggagctctgctgcagtgaggcaggacagagacctgaaaacattggccagctggaagccaagtgtttagcttccccttccttgaatccaggaaatgaaagtgggtttgtagatatgtgcagtcttagtgtctgtgactccaaaagaaacctgtcatcagatcagcaattaattgatttattggaaaacaaaagcttagaaagtaaattgattttgagtcagaaccacagtgatgaggaggaagaagaggaggaaaacgaggaggaaaacttagccatggcagtaggcatgggggaaaggccagaggtattgcatctcacggagcccactactaacatctcaagggaaaagaaccaaggcttccaagatgaaaccaagaaaggaagcttagaggtggcaaaccagactcctgggctacagagggctttccccgctccagcagcctgtcagtgccactgcaaacacatggagaggtggatgcatggcctcgagaatgatgaatttgaaatcgagaaacccaaggcttatatcccagatctgttcaaaagtaaaaccaatactatcgccatggagggtgaacccactgctattccatcacagccgtttaaagtgaagcatgagcttttaaaagaaccttggaaagaaagtgcagaggggcaaaacgttttccccacatatcctcttgaaggaagtgagctcaaatcagaagacatggattttgagaataaagatgattatgatagagacggaaactgccatagtcaagattatccagggaagtactctgaagaggagagcaagagctcaacatcgggcatcacaggagacattggggatgagctacaggaggctcgagctcccactattgctcagctgctacaggagaaaactctctattccttctctgagtggccaaaggaccgcgtgataattaaccgcctagataatatctgccacgtggtgttaaaggggaagtggccctctagccagcagtatgagccctcaggcacactgcccaccccggtattaaccagcagtgctggttctcgaaccagcctctcagagccggaagcagcagaacacagcttcagcaacggcgcagcattggcggcccagatccacaaggagagcttcttagctccagtattcacaaaggatgaacaaaagcacaggcgtccctatgagtttgaggtggagagggatgcaaaggctcggggcctggagcagttctctgccacccacgggcacacccctatcatcctcaatggctggcatggggagtcagctatggacctctcctgctcatcagaggggtccccaggagccacatcccctttcccagtgagcgccagcacccctaagattggggctatcagttcacttcagggagcccttggcatggacttgtctgggattctgcaagctggcctgatccatcctgtgactggacagattgtcaatggaagcctcagaagagatgatgcagccacgaggaggcggagagggaggcggaaacatgttgaaggagggatggacctcatctttttgaaggagcagacacttcaggcgggaatcttggaagtccatgaagacccagggcaggccaccttgagcaccacacaccctgaggggccagggcctgccacctcggctcctgagccagctacggcagccagcagccaagccgagaaatccattcccagcaagagtctgcttgactggctaaggcagcaggctgactactccttagaagttcctggctttggggcaaatttttcagacaaaccaaagcagaggaggccacgctgtaaagaacctggaaaattagatgtcagctccctgagcggggaagagagagttcctgccatccccaaggagccaggactgagggggtttcttccagaaaacaagttcaatcacactctggctgagcctattcttcgagatacgggcccccgcaggagggggaggcggcctcggagcgaactcctgaaggctccttccattgtggcagactctccctctggaatggggccactgttcatgaatggactgattgctgggatggacctggtaggacttcagaacatgagaaatatgccaggcatccccctcaccgggctggtggggtttccagctggctttgccacgatgccaacaggtgaagaggtcaaaagtaccctgagcatgctgcccatgatgctgccaggcatggctgctgtgccccagatgtttggtgttgggggactcctcagtccacccatggcaaccacctgcacttccactgctccggcgtctctatcaagcacaacgaaaagtggtacggcagtgactgaaaagactgcggaagacaagccgagtagccatgatgtgaaaacagacactttagctgaggacaagcctggtccaggtccattttctgatcagtctgaacctgcaataactactagtagtcctgtggcttttaacccatttctcatcccaggagtatctcctggactcatttacccatccatgttcctctcccctggtatgggcatggctctgccagccatgcagcaggccagacactcggaaatagtaggtctggagagccagaagaggaagaagaagaagacaaagggggacaaccccaactcccacccagagcctgctcccagctgtgaaagggagcccagcggtgatgagaactgtgccgaacccagtgcccctttgcccgcagagagagaacatggggcacaggctggggagggggcactcaaagactccaacaacgacaccaattagaacttttttcatttaagaaattattgtgacttgtaagtttcttatcccataaaggtttgttacttccctcacttcacctccataagaacctgtgtttccataagtaagattacgtacctgatttcctgtctgagaactatggtaacagatgttaatagttgcagggtctcaccacttcattagataagtgttgtctacctagtctaggaggcacagaattctcattctgttatccagttcattccagcaatcatagttaatacagtacttggtgacacgccctacccccttctcttccaagtttcccactcacttgaggaggaaaaatggcaaaagaaagctgtctagggttttaccattgaagggtggaagaacagagacaaagaggagctctttttctgtgagctgggttgcacaggaagaatgtcacagggaaccaaaaagcacagaaaaaggaagtgctggtgcatatttttgagttaaaatatttccctattttatcatgattactaagtgagtagtatagacagaagtatataactaatggttgaaaatacatatattcatttctttataaaaaacaaaaaccttaccggtagtaatataatttcccccttggtggtttttcagacacctgcagcaagaagaaatactgactgactaggcattattttctatacatccctctcaccagtgaaaagattcctcttgctgcgagaaagctttacccaccatgagttattgctgtcgacgggggtggggcaaggacccgcgctccgtagagctacacgctgcttcacaagcacacggccagcgctctgctctcacctggttcgcttacagatttctctagccattaatttgcctctctgtgtttaaagagcaccaggaccgaatggattttcacttcaggctttccttcaccaagaataaggttctttctggagcctgcaagaagacagttgcccaacactttgacacttgctagtaggtcctttgatcaagagtgtctgaggctgtcaaatgtgtgccaccctttataatacagctatgaaaagttacttctccattaatttctccattctgtttatatcttacagttggacccaaattccaaattatcagttaatcgaaactacattgcaagtcaacattattttctcttcttcctcagcttctccatgtttaggaactgagaaagaacctgcctaagcagcacttccccatgtcctttcaccttcatgttaacgtcccttctgatggtctcactcttcacaggtagttcacactctgagacttgaagtaagctcatggttcagtactctgggggcgcagggctgcgcaggacccttggaaatgttgcaagtgttactagtaccagtttcactttttgttgtcacaatttactgtattttttactttttctgttacagttttgctaatttatcagaaggtccaaaagtctgacataactatttcattttgcattatttatttatgatgcttttttcattgtcttttatacatttgggattataaattatgtaaatgttaaaatgagcatctcaaagaagtctgttaaatcatgactgaaaaaaatcaatcagatgtatcttcaaaaagtggagtcccagttttatgaatcagagatataaaccagaaattctataactgatcatagaagaagaatccagtaattgaacaaatcctatttaatgacatccttgtagcatagatggtctataatgctgaccacagatttcttagaaatgctgctctctctatttaactaacattttgttcagttttgcctccagtggaagcagaaagggttttttcagctgttaaatcctaaaaatcaatataatttatttatgtaagaaaaataactcaatcaatatatttttgaaccttttaagtactaattttctttttatcacgtagaaaaaaaaatgtatttgccctaaatccttaaaatacaaatgctataaaaattcctgtatcttgaaagccttactgcaaatgagtattatagacatccc

SEQ ID NO: 36 - protein, 1026 aa, Homo sapien
ISINHDESLLPESLESMMYGKKVLSQEPSSFQESPSTNTESRKDVITISISKDGNCQSGGPEAEIASGPTFMGSLEAGGVAQANIKNGKHLLMSISKEGELCCSEAGQRPENIGQLEAKCLASPSLNPGNESGFVDMCSLSVCDSKRNLSSDQQLIDLLENKSLESKLILSQNHSDEEEEEEENEEENLAMAVGMGERPEVLHLTEPTTNISREKNQGFQDETKKGSLEVANQTPGLQRAFPAPAACQCHCKHMERWMHGLENDEFEIEKPKAYIPDLFKSKTNTIAMEGEPTAIPSQPFKVKHELLKEPWKESAEGQNVFPTYPLEGSELKSEDMDFENKDDYDRDGNCHSQDYPGKYSEEESKSSTSGITGDIGDELQEARAPTIAQLLQEKTLYSFSEWPKDRVIINRLDNICHVVLKGKWPSSQQYEPSGTLPTPVLTSSAGSRTSLSEPEAAEHSFSNGAALAAQIHKESFLAPVFTKDEQKHRRPYEFEVERDAKARGLEQFSATHGHTPIILNGWHGESAMDLSCSSEGSPGATSPFPVSASTPKIGAISSLQGALGMDLSGILQAGLIHPVTGQIVNGSLRRDDAATRRRRGRRKHVEGGMDLIFLKEQTLQAGILEVHEDPGQATLSTTHPEGPGPATSAPEPATAASSQAEKSIPSKSLLDWLRQQADYSLEVPGFGANFSDKPKQRRPRCKEPGKLDVSSLSGEERVPAIPKEPGLRGFLPENKFNHTLAEPILRDTGPRRRGRRPRSELLKAPSIVADSPSGMGPLFMNGLIAGMDLVGLQNMRNMPGIPLTGLVGFPAGFATMPTGEEVKSTLSMLPMMLPGMAAVPQMFGVGGLLSPPMATTCTSTAPASLSSTTKSGTAVTEKTAEDKPSSHDVKTDTLAEDKPGPGPFSDQSEPAITTSSPVAFNPFLIPGVSPGLIYPSMFLSPGMGMALPAMQQARHSEIVGLESQKRKKKKTKGDNPNSHPEPAPSCEREPSGDENCAEPSAPLPAEREHGAQAGEGALKDSNNDTN

SEQ ID NO: 37 - DNA, 1812 bp, Homo sapien
tagctaggcaggaagtcggcgcgggcggcgcggacagtatctgtgggtacccggagcacggagatctcgccggctttacgttcacctcggtgtctgcagcaccctccgcttcctctcctaggcgacgagacccagtggctagaagttcaccatgtctattctcaagatccatgccagggagatctttgactctcgcgggaatcccactgttgaggttgatctcttcacctcaaaaggtctcttcagagctgctgtgcccagtggtgcttcaactggtatctatgaggccctagagctccgggacaatgataagactcgctatatggggaagggtgtctcaaaggctgttgagcacatcaataaaactattgcgcctgccctggttagcaagaaactgaacgtcacagaacaagagaagattgacaaactgatgatcgagatggatggaacagaaaataaatctaagtttggtgcgaacgccattctgggggtgtcccttgccgtctgcaaagctggtgccgttgagaagggggtccccctgtaccgccacatcgctgacttggctggcaactctgaagtcatcctgccagtcccggcgttcaatgtcatcaatggcggttctcatgctggcaacaagctggccatgcaggagttcatgatcctcccagtcggtgcagcaaacttcagggaagccatgcgcattggagcagaggtttaccacaacctgaagaatgtcatcaaggagaaatatgggaaagatgccaccaatgtgggggatgaaggcgggtttgctcccaacatcctggagaataaagaaggcctggagctgctgaagactgctattgggaaagctggctacactgataaggtggtcatcggcatggacgtagcggcctccgagttcttcaggtctgggaagtatgacctggacttcaagtctcccgatgaccccagcaggtacatctcgcctgaccagctggctgacctgtacaagtccttcatcaaggactacccagtggtgtctatcgaagatccctttgaccaggatgactggggagcttggcagaagttcacagccagtgcaggaatccaggtagtgggggatgatctcacagtgaccaacccaaagaggatcgccaaggccgtgaacgagaagtcctgcaactgcctcctgctcaaagtcaaccagattggctccgtgaccgagtctcttcaggcgtgcaagctggcccaggccaatggttggggcgtcatggtgtctcatcgttcgggggagactgaagataccttcatcgctgacctggttgtggggctgtgcactgggcagatcaagactggtgccccttgccgatctgagcgcttggccaagtacaaccagctcctcagaattgaagaggagctgggcagcaaggctaagtttgccggcaggaacttcagaaaccccttggccaagtaagctgtgggcaggcaagcccttcggtcacctgttggctacacagacccctcccctcgtgtcagctcaggcagctcgaggcccccgaccaacacttgcaggggtccctgctagttagcgccccaccgccgtggagttcgtaccgcttccttagaacttctacagaagccaagctccctggagccctgttggcagctctagctttgcagtcgtgtaattggcccaagtcattgtttttctcgcctcactttccaccaagtgtctagagtcatgtgagcctcgtgtcatctccggggtggccacaggctagatccccggtggttttgtgctcaaaataaaaagcctcagtgacccatgag

SEQ ID NO: 38 - protein, 434 aa, Homo sapien
MSILKIHAREIFDSRGNPTVEVDLFTSKGLFRAAVPSGASTGIYEALELRDNDKTRYMGKGVSKAVEHINKTIAPALVSKKLNVTEQEKIDKLMIEMDGTENKSKFGANAILGVSLAVCKAGAVEKGVPLYRHIADLAGNSEVILPVPAFNVINGGSHAGNKLAMQEFMILPVGAANFREAMRIGAEVYHNLKNVIKEKYGKDATNVGDEGGFAPNILENKEGLELLKTAIGKAGYTDKVVIGMDVAASEFFRSGKYDLDFKSPDDPSRYISPDQLADLYKSFIKDYPVVSIEDPFDQDDWGAWQKFTASAGIQVVGDDLTVTNPKRIAKAVNEKSCNCLLLKVNQIGSVTESLQACKLAQANGWGVMVSHRSGETEDTFIADLVVGLCTGQIKTGAPCRSERLAKYNQLLRIEEELGSKAKFAGRNFRNPLAK

SEQ ID NO: 39 - DNA, 2561 bp, Homo sapien
gcctgagtgagtctctggcgtcccaaattgcctgtttttctcgcaggctctattccgttcgctggttcgccacctcaggggaacgatggccatggagtccacagccactgccgccgtcgccgcggacgtggtttctgccgacaaaattgaagatgtccctgctccttctacatctgcagataaagtggagagtctggatgtggatagtgaagctaagaaactattgggtttaggacagaaacatctggtgatgggggatattccagcagctgtcaatgcattccaggaagcagctagtcttttaggtaagaagtatggagagacagctaatgagtgtggagaagccttctttttctatgggaaatcacttctggagttggcaagaatggagaatggtgtgttgggaaacgccttggaaggtgtgcatgtggaagaggaagaaggagaaaaaacagaagatgaatctctggtagaaaataatgataacatagatgaggaagcaagggaagagttgagagaacaggtttatgacgccatgggagaaaaagaagaagccaaaaaaacagaagacaagtctttggcaaagcctgaaactgataaagaacaggacagtgaaatggagaagggtggaagagaagatatggatataagtaaatctgcagaggagccacaggaaaaagttgacttgactctagattggttaactgaaacctctgaagaggcaaaaggaggagcagcaccagaaggaccgaatgaagctgaggtcacttctgggaagccagaacaggaagtaccagatgctgaggaagaaaaatcagtttctggaactgatgtccaagaagagtgcagagaaaaaggaggtcaggagaagcagggagaggtaattgtgagcatagaggagaagccaaaagaagtttcagaagagcagcctgtggtgactctagaaaagcagggcactgcagtggaggtagaagcagagtctttagacccgacagtcaagccagtggatgtgggtggggacgagccagaggagaaggtagttacctctgaaaacgaggcaggaaaggcggttcttgaacaactggtaggtcaagaagtaccacctgctgaagagtcaccagaggtgcaaacagaggctgcagaggcctcagctgtagaggctggatcagaagtctctgaaaagcctgggcaggaggctccagttctccctaaggatggtgcagtcaatggaccgtcagttgtaggagatcagactcctattgaaccacagacttctatagaaagactgacagaaacaaaagatggctcaggactagaggagaaggtcagggcaaagctggttcctagtcaggaggagactaagctgtctgtagaagagtctgaggcagctggagatggggttgataccaaggtagcccagggagctactgagaaatcacctgaagacaaagttcagatagctgctaatgaagagacacaagagagagaagaacagatgaaagagggtgaagaaactgaaggctcggaagaggatgataaagaaaatgataagactgaagaaatgccaaatgattcagtccttgaaaacaagtctcttcaagaaaatgaggaggaggagattgggaacctagagcttgcctgggatatgctggatttagcaaagatcatttttaaaaggcaagaaacaaaagaagcacagctttatgctgcccaggcacatcttaaactcggagaagttagtgttgaatctgaaaactatgtgcaagctgtggaggagttccagtcctgccttaacctgcaggaacagtacctggaagcccacgaccgtctgcttgcagagacccactaccagctgggcttggcttatgggtacaactctcagtatgatgaggcagtggcacagttcagcaaatctattgaagtcattgagaacagaatggctgtactaaacgagcaggtgaaggaggctgaaggatcgtctgaatacaagaaagaaattgaggaactaaaggaactgctacccgaaattagagagaagatagaagatgcaaaggagtctcagcgtagtgggaatgtagctgaactggctctgaaagctactctggtggagagttctacttcaggtttcactcctggtggaggaggctcttcagtctccatgattgccagtagaaagccaacagacggtgcttcctcatcaaattgtgtgactgatatttcccaccttgtcagaaagaagaggaaaccagaggaagagagtccccggaaagatgatgcaaagaaagccaaacaagagccggaggtgaacggaggcagtggggatgctgtcccgagtggaaatgaagtttcggaaaacatggaggaggaggctgagaatcagctgaaacgcggagcagcagtggaggggacactggaggctggagctacagttgaaagcactgcatgttaagagggggcacagcctcctcccaagggaaagtgtttttgtatataatgtattttttcacttttggaggattctttttgtataacttcaataaagattgtaagcaaaaaaaaaa

SEQ ID NO: 40 - protein, 787 aa, Homo sapien [sequence omitted]

SEQ ID NO: 41 - DNA, 1197 bp, Homo sapien
tttcttcgcggctgctcaagatgaaccgactcttcgggaaagcgaaacccaaggctccgccgcccagcctgactgactgcattggcacggtggacagtagagcagaatccattgacaagaagatttctcgattggatgctgagctagtgaagtataaggatcagatcaagaagatgagagagggtcctgcaaagaatatggtcaagcagaaagccttgcgagttttaaagcaaaagaggatgtatgagcagcagcgggacaatcttgcccaacagtcattcaacatggaacaagccaattataccatccagtctttgaaggacaccaagaccacggttgatgctatgaaactgggagtaaaggaaatgaagaaggcatacaagcaagtgaagatcgaccagattgaggatttacaagaccagctagaggatatgatggaagatgcaaatgaaatccaagaagcactgagtcgcagttatggcaccccagaactggatgaagatgatttagaagcagagttggatgcactaggtgatgagcttctggctgatgaagacagttcttatttggatgaggcagcatctgcacctgcaattccagaaggtgttcccactgatacaaaaaacaaggatggagttctggtggatgaatttggattgccacagatccctgcttcatagatttgcatcattcaagcatatcttgtaaaacaaacacatattatgggactaggaaatatttatctttccaaatttgccataacagatttaggtttctttcctttctttgaaggaaagtttaattacattgctcttttattttttccattaagagactcattgcttgggaaatgctttcttcgtactaaaatttgattcctttttttcttatgaaaaacgaactcagtttaaaagtatttttagctcgtatgacttgttttcattcattaataataatttgaaataaaactaaggaaatggaatcttaaaagtctatgacagtgtaactctacagtcctcaaaatgaccctgtaaatttggataagaccaaagatgagattattggggctggtcatattatgattcagaatccatttctattgtgggtattatagggttgggttaaaggtgatggccctttttgatgggttttgttgtgtcttgtgaacaagtcgttactgtgtccattattggaatg

SEQ ID NO: 42 - protein, 219 aa, Homo sapien
MNRLFGKAKPKAPPPSLTDCIGTVDSRAESIDKKISRLDAELVKYKDQIKKMREGPAKNMVKQKALRVLKQKRMYEQQRDNLAQQSFNMEQANYTIQSLKDTKTTVDAMKLGVKEMKKAYKQVKIDQIEDLQDQLEDMMEDANEIQEALSRSYGTPELDEDDLEAELDALGDELLADEDSSYLDEAASAPAIPEGVPTDTKNKDGVLVDEFGLPQIPAS

SEQ ID NO: 43 - DNA, 519 bp, Homo sapien
ggaatcagagggagcattcactgagtgcttattggttctacgcactgttaggtgttcctttgtgtcttacctcatccacctctcgcatccccccttggaacaagatagcatcattaccctacatctcttgaaggttcaggtccctgggctgcaaggagataagaggctccctcacacagcctctggagggctaaatgagatcctacagcaatgccctggtggggcttctctctccctcttatgtcacttgtcacacctgctctaggtaatcattttcctccagatgagaggtgtaggaaaggacctgatgccagcaaggaaaaaggaattggtaacatgctctttgtttacctaaaatctgtccccacaacaagaatgtaacttccttcgaggcagaaattcaattttcttctcccagcccacctacaaaggcccactcaagagcaagttctgtgtaaaggtgcttaactaatacaggttctttgacaaaatgataaaacatttgtaacctgaaaaaaa

SEQ ID NO: 44 - protein, 87 aa, Homo sapien
ESEGAFTECLLVLRTVRCSFVSYLIHLSHPPLEQDSIITLHLLKVQVPGLQGDKRLPHTASGGLNEILQQCPGGASLSLLCHLSHLL

SEQ ID NO: 45 - DNA, 3061 bp, Homo sapien
cggcacgaggcgactttggtggaggtagttctttggcagcgggcatggcgggtaccgtggtgctggacgatgtggagctgcgggaggctcagagagattacctggacttcctggacgacgaggaagaccagggaatttatcagagcaaagttcgggagctgatcagtgacaaccaataccggctgattgtcaatgtgaatgacctgcgcaggaaaaacgagaagagggctaaccggcttctgaacaatgcctttgaggagctggttgccttccagcgggccttaaaggattttgtggcctccattgatgctacctatgccaagcagtatgaggagttctacgtaggactggaaggcagctttggctccaagcacgtctccccgcggactcttacctcctgcttcctcagctgtgtggtctgtgtggagggcattgtcactaaatgttctctagttcgtcccaaagtcgtccgcagtgtccactactgtcctgctactaagaagaccatagagcgacgttattctgatctcaccaccctggtggcctttccctccagctctgtctatcctaccaaggatgaggagaacaatccccttgagacagaatatggcctttctgtctacaaggatcaccagaccatcaccatccaggagatgccggagaaggccccagccggccagctcccccgctctgtggacgtcattctggatgatgacttggtggataaagcgaagcctggtgaccgggttcaggtggtgggaacctaccgttgccttcctggaaagaagggaggctacacctctgggaccttcaggactgtcctgattgcctgtaatgttaagcagatgagcaaggatgctcagccctctttctctgctgaggatatagccaagatcaagaagttcagtaaaacccgatccaaggatatctttgaccagctggccaagtcattggccccaagtatccatgggcatgactatgtcaagaaagcaatcctctgcttgctcttgggaggggtggaacgagacctagaaaatggcagccacatccgtggggacatcaatattcttctaataggagacccatccgttgccaagtctcagcttctgcggtatgtgctttgcactgcaccccgagctatccccaccactggccggggctcctctggagtgggtctgacggctgctgtcaccacagaccaggaaacaggagagcgccgtctggaagcaggggccatggtcctggctgaccgaggcgtggtttgcattgatgaatttgacaaaatgtctgacatggatcgcacagccatccatgaagtgatggagcagggtcgagtgaccattgccaaggctggcatccatgctcggctgaatgcccgctgcagtgttttggcagctgccaaccctgtctacggcaggtatgaccagtataagactccaatggagaacattgggctacaggactcactgctgtcacgatttgacttgctcttcatcatgctggatcagatggatcctgagcaggatcgggagatctcagaccatgtccttcggatgcaccgttacagagcacctggggagcaggatggcgatgctatgcccttgggtagtgctgtggatatcctggccacagatgatcccaactttagccaggaagatcagcaggacacccagatttatgagaagcatgacaaccttctacatgggaccaagaagaaaaaggagaagatggtgagtgcagcattcatgaagaagtacatccatgtggccaaaatcatcaagcctgtcctgacacaggagtcggccacctacattgcagaagagtattcacgcctgcgcagccaggatagcatgagctcagacaccgccaggacatctccagttacagcccgaacactggaaactctgattcgactggccacagcccatgcgaaggcccgcatgagcaagactgtggacctgcaggatgcagaggaagctgtggagttggtccagtatgcttactttaagaaggttctggagaaggagaagaaacgtaagaagcgaagtgaggatgaatcagagacagaagatgaagaggagaaaagccaagaggaccaggagcagaagaggaagagaaggaagactcgccagccagatgccaaagatggggattcatacgacccctatgacttcagtgacacagaggaggaaatgcctcaagtacacactccaaagacggcagactcacaggagaccaaggaatcccagaaagtggagttgagtgaatccaggttgaaggcattcaaggtggccctcttggatgtgttccgggaagctcatgcgcagtcaatcggcatgaatcgcctcacagaatccatcaaccgggacagcgaagagcccttctcttcagttgagatccaggctgctctgagcaagatgcaggatgacaatcaggtcatggtgtctgagggcatcatcttcctcatctgaggaggcctcgtctctgaacttgggttgtgccgagagagtttgttctgtgtttcccaccctctccctgacccaagtctttgcctctactcccttaacagtgttgaattcaactgaaggcgaggaatgttggtgatgaagctgagttcaggactcggtggaccctttgggaatgggtcatgaaagctgccatggggtgaggaaagaggagacagtgggagaggacaatgactattgcatcttcattgcaaaagcactggctcatccgccctacttcccatcccacacaaacccaattgtaaataacatatgacttctgagtacttttgggggcacaactgttttctgtttgctgtttttttgttttgttttttttctccagagcactttggtctagactaggctttgggtggttccaattggtggagagaagctctgaggcacgtcatgcaggtcaagaaagctttctttgcagtagcaccagttaaggtgaatatgtattgtatcacaaaacaaacccaatatccagatgaatatccgagatgttgaataaacttagccatttcgtacaaaaaaaggggggcccggtaaac

SEQ ID NO: 46 - protein, 808 aa, Homo sapien
MAGTVVLDDVELREAQRDYLDFLDDEEDQGIYQSKVRELISDNQYRLIVNVNDLRRKNEKRANRLLNNAFEELVAFQRALKDFVASIDATYAKQYEEFYVGLEGSFGSKHVSPRTLTSCFLSCVVCVEGIVTKCSLVRPKVVRSVHYCPATKKTIERRYSDLTTLVAFPSSSVYPTKDEENNPLETEYGLSVYKDHQTITIQEMPEKAPAGQLPRSVDVILDDDLVDKAKPGDRVQVVGTYRCLPGKKGGYTSGTFRTVLIACNVKQMSKDAQPSFSAEDIAKIKKFSKTRSKDIFDQLAKSLAPSIHGHDYVKKAILCLLLGGVERDLENGSHIRGDINILLIGDPSVAKSQLLRYVLCTAPRAIPTTGRGSSGVGLTAAVTTDQETGERRLEAGAMVLADRGVVCIDEFDKMSDMDRTAIHEVMEQGRVTIAKAGIHARLNARCSVLAAANPVYGRYDQYKTPMENIGLQDSLLSRFDLLFIMLDQMDPEQDREISDHVLRMHRYRAPGEQDGDAMPLGSAVDILATDDPNFSQEDQQDTQIYEKHDNLLHGTKKKKEKMVSAAFMKKYIHVAKIIKPVLTQESATYIAEEYSRLRSQDSMSSDTARTSPVTARTLETLIRLATAHAKARMSKTVDLQDAEEAVELVQYAYFKKVLEKEKKRKKRSEDESETEDEEEKSQEDQEQKRKRRKTRQPDAKDGDSYDPYDFSDTEEEMPQVHTPKTADSQETKESQKVELSESRLKAFKVALLDVFREAHAQSIGMNRLTESINRDSEEPFSSVEIQAALSKMQDDNQVMVSEGIIFLI

SEQ ID NO: 47 - DNA, 1640 bp, Homo sapien
aatgccacctgcttgaaggctatatgtgacaagtcactagaggttcacctgcaggttgacgccatgtacacaaatgtcaaagtaactaatatttgctctgatgggacactctactgccaggtgccttgtaagggtctgaacaagctcagtgaccttctacgtaagatagaggactacttccattgcaagcacatgacctctgagtgctttgtttcattacccttctgtgggaaaatctgcctcttccattgcaaaggaaaatggttacgagtagagatcacaaatgttcacagcagccgggctcttgatgttcagttcctggactctggcactgtgacatctgtaaaagtgtcagagctcagggaaattccacctcggtttctacaagaaatgattgcaataccacctcaggccattaagtgctgtttagcagatcttccacaatctattggcatgtggacaccagatgcagtgctgtggttaagagattctgttttgaattgctcggactgtagcattaaggttacaaaagtggatgaaaccagagggatcgcacatgtttatttatttacccctaagaacttccctgaccctcatcgcagtattaatcgccagattacaaatgcagacttgtggaagcatcagaaggatgtgtttttgagtgccatatccagtggagctgactctcccaacagcaaaaatggcaacatgcccatgtcgggcaacactggagagaatttcagaaagaacctcacagatgtcatcaaaaagtccatggtggaccatacgagcgctttctccacagaggaactgccacctcctgtccacttatcaaagccaggggaacacatggatgtgtatgtgcctgtggcctgtcacccaggctacttcgtcatccagccttggcaggagatacataagttggaagttctgatggaagagatgattctatattacagcgtgtctgaagagcgccacatagcagtggagaaagaccaagtgtatgctgcaaaagtggaaaataagtggcacagggtgcttttaaaaggaatcctgaccaatggactggtatctgtgtatgagctggattatggcaaacacgaattagtcaacataagaaaagtacagcccctagtggacatgttccgaaagctgcccttccaagcagtcacagctcaacttgcaggagtgaagtgcaaccagtggtctgaggaggcttctatggtgtttcgaaatcatgtggagaagaaacctctggtggcactggtgcagacagtcattgaaaatgctaacccttgggaccggaaagtagtggtctacttagtggacacatcgttgccagacaccgatacctggattcatgattttatgtcagagtatctgatagagctttcaaaagttaattaatgactgcctctgaaaccttgacaactaattcagattttttagcaataacaaaatgtagtaggcttaaaaaaaatcttaactctgctacatggctctgactgctgtgggggattgaaaagaatatgcttatgtttgatgaaagatatttaacaagttttgttttaacagagttgacttttcaaagaaaattgtacttgaattattactataatattagaataaaaatgtttatc

SEQ ID NO: 48 - protein, 468 aa, Homo sapien
NATCLKAICDKSLEVHLQVDAMYTNVKVTNICSDGTLYCQVPCKGLNKLSDLLRKIEDYFHCKHMTSECFVSLPFCGKICLFHCKGKWLRVEITNVHSSRALDVQFLDSGTVTSVKVSELREIPPRFLQEMIAIPPQAIKCCLADLPQSIGMWTPDAVLWLRDSVLNCSDCSIKVTKVDETRGIAHVYLFTPKNFPDPHRSINRQITNADLWKHQKDVFLSAISSGADSPNSKNGNMPMSGNTGENFRKNLTDVIKKSMVDHTSAFSTEELPPPVHLSKPGEHMDVYVPVACHPGYFVIQPWQEIHKLEVLMEEMILYYSVSEERHIAVEKDQVYAAKVENKWHRVLLKGILTNGLVSVYELDYGKHELVNIRKVQPLVDMFRKLPFQAVTAQLAGVKCNQWSEEASMVFRNHVEKKPLVALVQTVIENANPWDRKVVVYLVDTSLPDTDTWIHDFMSEYLIELSKVN

SEQ ID NO: 49 - DNA, 1908 bp, Homo sapien
gcggaaggaaccgccgggggccatggacggagcagtgatggaagggccgctttttttgcagagtcagcgctttgggaccaagaggtggaggaagacctgggccgtgctctacccggccagtccccacggcgtagcgcggctcgagttctttgaccataaggggtcgagctctgggggtggccgagggagctcgcgccgcctggactgcaaagtgatccgtctggctgagtgtgtgagtgtggcccccgtcaccgtggagaccccccctgagcccggcgccactgccttccgcctggacactgctcagcgctcgcacctgctggcggccgacgcgccgtccagtgcagcctgggtgcagacgctgtgccgaaacgcctttccgaaaggcagctggactctggcgcctaccgataacccacctaagctttctgccctggagatgctggagaactccttgtacagccctacctgggaaggatcccaattctgggtaacggtgcagaggactgaggccgccgagcgctgtggcctgcatggctcctacgtgctgagggtggaggctgaaaggctgactctcctgaccgtgggggcccagagtcagatactggagccactcctgtcctggccctacactctgttgcgtcgctatggccgggacaaggtcatgttctctttcgaggccggccgccgctgcccctcaggccctggaaccttcaccttccagacggcacagggaaatgacatcttccaggcagttgagactgccatccaccggcagaaggcccagggaaaggccggacaggggcacgatgttctcagagctgactcccatgaaggggaggtggcagaggggaagttgccttccccacctggcccccaagagctcctcgacagtcccccagccctgtatgctgagcccttagactccctgcgcattgctccatgcccttcccaggactccctatactcagaccccttggacagcacgtctgctcaggcaggagagggagtacaacggaagaaacctctctattgggacttgtatgagcatgcgcagcagcagttgctgaaggccaagctgacagaccccaaagaggatcccatctatgatgaacctgagggcctggccccagtccctccccagggcctttatgatctgcctcgggagcccaaggatgcatggtggtgccaagctcgggtgaaggaggagggctatgagctcccctacaaccctgccactgatgactacgctgtgccaccccctcggagcacaaagcccctccttgctcccaagccccagggcccagccttccctgaacctggtactgcaactggcagtggcatcaaaagccacaactcagccctgtacagccaggtccagaagagcggggcctcagggagctgggactgtgggctctctagagtagggactgacaagactggggtcaagtcagagggctctacctgagaaggacggcaaggctgaggtggctaagggggaccatggggaggtggcactagggatcaaagaagatggttagaaccagcagaagccagagggtgggaggggccatgctgtgtgagaccaggggaccagagggatgggagagtcaagggaaggacaatcccaggaagtcctaagaagtggggcagatggcagggctgaggatgggctctgcatcccccaaagccatcccttccctacttccccaaatgaagggacggctgtgggaccaggtctgtggaaagtggtgcatggtcagaatgggtgcagtttgaggggcctgtgtggaggcctcagggagatgttggactgtgcctggatccttactcctgcattgttctttgccagagacctatttaaaaattttaaaattctcattaaagtcaaaaaaaaaaaaaaaaaaa

SEQ ID NO: 50 - protein, 481 aa, Homo sapien [sequence omitted]

SEQ ID NO: 51 - DNA, 2107 bp, Homo sapien
agtaaaagtccacagttaccgtgagagaaaaaaagaggagaaagcagtgcagccaaactcggaagaaaagagaggaggaaaaggactcgactttcacattggaacaaccttctttccagtgctaaggctctctgatctggggaacaacacctggacatggctccagagatcaacttgccgggcccaatgagcctcattgataacactaaagggcagctggtggtgaatccagaagctctgaagatcctatctgcaattacgcagcctgtggtggtggtggcgattgtgggcctctatcgcacaggcaaatcctacctgatgaacaagctggctgggaagaaaaacggcttctctctaggctccacagtgaagtctcacaccaagggaatctggatgtggtgtgtgcctcatcccaagaagccagaacacaccctagttctgctcgacactgagggcctgggagatatagagaagggtgacaatgagaatgactcctggatctttgccttggccatcctcctgagcagcaccttcgtgtacaatagcatgggaaccatcaaccagcaggccatggaccaacttcactatgtgacagagctgacagatcgaatcaaggcaaactcctcacctggtaacaattctgtagacgactcagctgactttgtgagcttttttccagcatttgtgtggactctcagagatttcaccctggaactggaagtagatggagaacccatcactgctgatgactacttggagctttcgctaaagctaagaaaaggtactgataagaaaagtaaaagctttaatgatcctcggttgtgcatccgaaagttcttccccaagaggaagtgcttcgtcttcgattggcccgctcctaagaagtaccttgctcacctagagcagctaaaggaggaagagctgaaccctgatttcatagaacaagttgcagaattttgttcctacatcctcagccattccaatgtcaagactctttcaggtggcattgcagtcaatgggcctcgtctagagagcctggtgctgacctacgtcaatgccatcagcagtggggatctaccctgcatggagaacgcagtcctggccttggcccagatagagaactcagccgcagtggaaaaggctattgcccactatgaacagcagatgggccagaaggtgcagctgcccacggaaaccctccaggagctgctggacctgcacagggacagtgagagagaggccattgaagtcttcatgaagaactctttcaaggatgtggaccaaatgttccagaggaaattaggggcccagttggaagcaaggcgagatgacttttgtaagcagaattccaaagcatcatcagattgttgcatggctttacttcaggatatatttggccctttagaagaagatgtcaagcagggaacattttctaaaccaggaggttaccgtctctttactcagaagctgcaggagctgaagaataagtactaccaggtgccaaggaaggggatacaggccaaagaggtgctgaaaaaatatttggagtccaaggaggatgtggctgatgcacttctacagactgatcagtcactctcagaaaaggaaaaagcgattgaagtggaacgtataaaggctgaatctgcagaagctgcaaagaaaatgttggaggaaatacaaaagaagaatgaggagatgatggaacagaaagagaagagttatcaggaacatgtgaaacaattgactgagaagatggagagggacagggcccagttaatggcagagcaagagaagaccctcgctcttaaacttcaggaacaggaacgccttctcaaggagggattcgagaatgagagcaagagacttcaaaaagacatatgggatatccagatgagaagcaaatcattggagccaatatgtaacatactctaaaagtccaaggagcaaaatttgcctgtccagctccctctccccaagaaacaacatgaatgagcaacttcagagtgtcaaacaactgccattaaacttaactcaaaatcatgatgcatgcatttttgttgaaccataaagtttgcaaagtaaaggttaagtatgaggtcaatgtttt

SEQ ID NO: 52 - protein, 591 aa, Homo sapien
MAPEINLPGPMSLIDNTKGQLVVNPEALKILSAITQPVVVVAIVGLYRTGKSYLMNKLAGKKNGFSLGSTVKSHTKGIWMWCVPHPKKPEHTLVLLDTEGLGDIEKGDNENDSWIFALAILLSSTFVYNSMGTINQQAMDQLHYVTELTDRIKANSSPGNNSVDDSADFVSFFPAFVWTLRDFTLELEVDGEPITADDYLELSLKLRKGTDKKSKSFNDPRLCIRKFFPKRKCFVFDWPAPKKYLAHLEQLKEEELNPDFIEQVAEFCSYILSHSNVKTLSGGIAVNGPRLESLVLTYVNAISSGDLPCMENAVLALAQIENSAAVEKAIAHYEQQMGQKVQLPTETLQELLDLHRDSEREAIEVFMKNSFKDVDQMFQRKLGAQLEARRDDFCKQNSKASSDCCMALLQDIFGPLEEDVKQGTFSKPGGYRLFTQKLQELKNKYYQVPRKGIQAKEVLKKYLESKEDVADALLQTDQSLSEKEKAIEVERIKAESAEAAKKMLEEIQKKNEEMMEQKEKSYQEHVKQLTEKMERDRAQLMAEQEKTLALKLQEQERLLKEGFENESKRLQKDIWDIQMRSKSLEPICNIL

SEQ ID NO: 53 - DNA, 1600 bp, Homo sapien
gccccgccgccggcagtggaccgctgtgcgcgaaccctgaaccctacggtcccgacccgcgggcgaggccgggtacctgggctgggatccggagcaagcgggcgagggcagcgccctaagcaggcccggagcgatggcagccttgatgaccccgggaaccggggccccacccgcgcctggtgacttctccggggaagggagccagggacttcccgacccttcgccagagcccaagcagctcccggagctgatccgcatgaagcgagacggaggccgcctgagcgaagcggacatcaggggcttcgtggccgctgtggtgaatgggagcgcgcagggcgcacagatcggggccatgctgatggccatccgacttcggggcatggatctggaggagacctcggtgctgacccaggccctggctcagtcgggacagcagctggagtggccagaggcctggcgccagcagcttgtggacaagcattccacagggggtgtgggtgacaaggtcagcctggtcctcgcacctgccctggcggcatgtggctgcaaggtgccaatgatcagcggacgtggtctggggcacacaggaggcaccttggataagctggagtctattcctggattcaatgtcatccagagcccagagcagatgcaagtgctgctggaccaggcgggctgctgtatcgtgggtcagagtgagcagctggttcctgcggacggaatcctatatgcagccagagatgtgacagccaccgtggacagcctgccactcatcacagcctccattctcagtaagaaactcgtggaggggctgtccgctctggtggtggacgttaagttcggaggggccgccgtcttccccaaccaggagcaggcccgggagctggcaaagacgctggttggcgtgggagccagcctagggcttcgggtcgcggcagcgctgaccgccatggacaagcccctgggtcgctgcgtgggccacgccctggaggtggaggaggcgctgctctgcatggacggcgcaggcccgccagacttaagggacctggtcaccacgctcgggggcgccctgctctggctcagcggacacgcggggactcaggctcagggcgctgcccgggtggccgcggcgctggacgacggctcggcccttggccgcttcgagcggatgctggcggcgcagggcgtggatcccggtctggcccgagccctgtgctcgggaagtcccgcagaacgccggcagctgctgcctcgcgcccgggagcaggaggagctgctggcgcccgcagatggcaccgtggagctggtccgggcgctgccgctggcgctggtgctgcacgagctcggggccgggcgcagccgcgctggggagccgctccgcctgggggtgggcgcagagctgctggtcgacgtgggtcagaggctgcgccgtgggaccccctggctccgcgtgcaccgggacggccccgcgctcagcggcccgcagagccgcgccctgcaggaggcgctcgtactctccgaccgcgcgccattcgccgccccctcgcccttcgcagagctcgttctgccgccgcagcaataaagctcctttgccgcgaaa

SEQ ID NO: 54 - protein, 482 aa, Homo sapien
MAALMTPGTGAPPAPGDFSGEGSQGLPDPSPEPKQLPELIRMKRDGGRLSEADIRGFVAAVVNGSAQGAQIGAMLMAIRLRGMDLEETSVLTQALAQSGQQLEWPEAWRQQLVDKHSTGGVGDKVSLVLAPALAACGCKVPMISGRGLGHTGGTLDKLESIPGFNVIQSPEQMQVLLDQAGCCIVGQSEQLVPADGILYAARDVTATVDSLPLITASILSKKLVEGLSALVVDVKFGGAAVFPNQEQARELAKTLVGVGASLGLRVAAALTAMDKPLGRCVGHALEVEEALLCMDGAGPPDLRDLVTTLGGALLWLSGHAGTQAQGAARVAAALDDGSALGRFERMLAAQGVDPGLARALCSGSPAERRQLLPRAREQEELLAPADGTVELVRALPLALVLHELGAGRSRAGEPLRLGVGAELLVDVGQRLRRGTPWLRVHRDGPALSGPQSRALQEALVLSDRAPFAAPSPFAELVLPPQQ

SEQ ID NO: 55 - DNA, 1368 bp, Homo sapien
aagatggcggcgcggggccgcgcccgcgctcccaggctctcctcccccagccttcctccggctggcagcacgactcgcgtagccgtgcgccgattgcctctcggcctgggcaatggtcccggctgccggtcgacgaccgccccgcgtcatgcggctcctcggctggtggcaagtattgctgtgggtgctgggacttcccgtccgcggcgtggaggttgcagaggaaagtggtcgcttatggtcagaggagctcctgcatgacccgatgggccgggacagggcagcagaagaggccaatgcggtgctggggctggacacccaaggcgatcacatggtgatgctgtctgtgattcctggggaagctgaggacaaggtgagttcagagcctagcggcgtcacctgtggtgctggaggagcggaggactcaaggtgcaacgtccgagagagccttttctctctggatggcgctggagcacacttccctgacagagaggaggagtattacacagagccagaagtggcggaatctgacgcagccccgacagaggactccaataacactgaaagtctgaaatccccaaaggtgaactgtgaggagagaaacattacaggattagaaaatttcactctgaaaattttaaatatgtcacaggaccttatggattttctgaacccaaacggtagtgactgtactctagtcctgttttacaccccgtggtgccgcttttctgccagtttggcccctcactttaactctctgccccgggcatttccagctcttcactttttggcactggatgcatctcagcacagcagcctttctaccaggtttggcaccgtagctgttcctaatattttattatttcaaggagctaaaccaatggccagatttaatcatacagatcgaacactggaaacactgaaaatcttcatttttaatcagacaggtatagaagccaagaagaatgtggtggtaactcaagccgaccaaataggccctcttcccagcactttgataaaaagtgtggactggttgcttgtattttccttattctttttaattagttttattatgtatgctaccattcgaactgagagtattcggtggctaattccaggacaagagcaggaacatgtggagtagtgatggtctgaaagaagttggaaagaggaacttcaatccttcgtttcagaaattagtgctacagtttcatacattttctccagtgacgtgttgacttgaaacttcaggcagattaaaagaatcatttgttgaacaactgaatgtataaaaaaattataaactggtgttttaactagtattgcaataagcaaatgcaaaaatattcaaaaaaaaaaaaaaaaaaa

SEQ ID NO: 56 - protein, 343 aa, Homo sapien
MVPAAGRRPPRVMRLLGWWQVLLWVLGLPVRGVEVAEESGRLWSEELLHDPMGRDRAAEEANAVLGLDTQGDHMVMLSVIPGEAEDKVSSEPSGVTCGAGGAEDSRCNVRESLFSLDGAGAHFPDREEEYYTEPEVAESDAAPTEDSNNTESLKSPKVNCEERNITGLENFTLKILNMSQDLMDFLNPNGSDCTLVLFYTPWCRFSASLAPHFNSLPRAFPALHFLALDASQHSSLSTRFGTVAVPNILLFQGAKPMARFNHTDRTLETLKIFIFNQTGIEAKKNVVVTQADQIGPLPSTLIKSVDWLLVFSLFFLISFIMYATIRTESIRWLIPGQEQEHVE

SEQ ID NO: 57 - DNA, 1078 bp, Homo sapien
ccgtggacatctcaggtcttcagggtcttccatctggaactatataaagttcagaaaacatgtctcgaagatatgactccaggaccactatattttctccagaaggtcgcttataccaagttgaatatgccatggaagctattggacatgcaggcacctgtttgggaattttagcaaatgatggtgttttgcttgcagcagagagacgcaacatccacaagcttcttgatgaagtctttttttctgaaaaaatttataaactcaatgaggacatggcttgcagtgtggcaggcataacttctgatgctaatgttctgactaatgaactaaggctcattgctcaaaggtatttattacagtatcaggagccaataccttgtgagcagttggttacagcactgtgtgatatcaaacaagcttatacacaatttggaggaaaacgtccctttggtgtttcattgctgtacattggctgggataagcactatggctttcagctctatcagagtgaccctagtggaaattacgggggatggaaggccacatgcattggaaataatagcgctgcagctgtgtcaatgttgaaacaagactataaagaaggagaaatgaccttgaagtcagcacttgctttagctatcaaagtactaaataagaccatggatgttagtaaactctctgctgaaaaagtggaaattgcaacactaacaagagagaatggaaagacagtaatcagagttctcaaacaaaaagaagtggagcagttgatcaaaaaacatgaggaagaagaagccaaagctgagcgtgagaagaaagaaaaagaacagaaagaaaaggataaatagaatcagagattttattactcatttggggcaccatttcagtgtaaaagcagtcctactcttccacactaggaaggctttactttttttaactggtgcagtgggaaaataggacattacatactgaattgggtccttgtcatttctgtccaattgaatactttattgtaacgatgatggttacccttcatggacgtcttaatcttccacacacatcccctttttttggaataaaa

SEQ ID NO: 58 - protein, 261 aa, Homo sapien
MSRRYDSRTTIFSPEGRLYQVEYAMEAIGHAGTCLGILANDGVLLAAERRNIHKLLDEVFFSEKIYKLNEDMACSVAGITSDANVLTNELRLIAQRYLLQYQEPIPCEQLVTALCDIKQAYTQFGGKRPFGVSLLYIGWDKHYGFQLYQSDPSGNYGGWKATCIGNNSAAAVSMLKQDYKEGEMTLKSALALAIKVLNKTMDVSKLSAEKVEIATLTRENGKTVIRVLKQKEVEQLIKKHEEEEAKAEREKKEKEQKEKDK

SEQ ID NO: 59 - DNA, 1919 bp, Homo sapien
ctgaagaacaaatcagcctggtcaccagcttttcggaacagcagagacacagagggcagtcatgagtgaggtcaccaagaattccctggagaaaatccttccacagctgaaatgccatttcacctggaacttattcaaggaagacagtgtctcaagggatctagaagatagagtgtgtaaccagattgaatttttaaacactgagttcaaagctacaatgtacaacttgttggcctacataaaacacctagatggtaacaacgaggcagccctggaatgcttacggcaagctgaagagttaatccagcaagaacatgctgaccaagcagaaatcagaagtctagtcacttggggaaactacgcctgggtctactatcacttgggcagactctcagatgctcagatttatgtagataaggtgaaacaaacctgcaagaaattttcaaatccatacagtattgagtattctgaacttgactgtgaggaagggtggacacaactgaagtgtggaagaaatgaaagggcgaaggtgtgttttgagaaggctctggaagaaaagcccaacaacccagaattctcctctggactggcaattgcgatgtaccatctggataatcacccagagaaacagttctctactgatgttttgaagcaggccattgagctgagtcctgataaccaatacgtcaaggttctcttgggcctgaaactgcagaagatgaataaagaagctgaaggagagcagtttgttgaagaagccttggaaaagtctccttgccaaacagatgtcctccgcagtgcagccaaattttacagaagaaaaggtgacctagacaaagctattgaactgtttcaacgggtgttggaatccacaccaaacaatggctacctctatcaccagattgggtgctgctacaaggcaaaagtaagacaaatgcagaatacaggagaatctgaagctagtggaaataaagagatgattgaagcactaaagcaatatgctatggactattcgaataaagctcttgagaagggactgaatcctctgaatgcatactccgatctcgctgagttcctggagacggaatgttatcagacaccattcaataaggaagtccctgatgctgaaaagcaacaacaatcccatcagcgctactgcaaccttcagaaatataatgggaagtctgaagacactgctgtgcaacatggtttagagggtttgtccataagcaaaaaatcaactgacaaggaagagatcaaagaccaaccacagaatgtatctgaaaatctgcttccacaaaatgcaccaaattattggtatcttcaaggattaattcataagcagaatggagatctgctgcaagccaaatgttatgagaaggaactgggccgcctgctaagggatgccccttcaggcataggcagtattttcctgtcagcatctgagcttgaggatggtagtgaggaaatgggccagggcgcagtcagctccagtcccagagagctcctctctaactcagagcaactgaactgagacagaggaggaaaacagagcatcagaagcctgcagtggtggttgtgacgggtaggaggataggaagacagggggcccaacctgggattgctgagcagggaagctttgcatgttgctctaaggtacatttttaaagagttgttttttggccgggcgcagtgctcatgcctgtaatcccagaactttgggaggccgaggtgggcggatcacgaggtctggagtttgagaccatcctggctaacacagtgaaatcccgtctctactaaaaatacaaaaaattagccaggcgtggtggctggcacctgtagtcccagctacttgggaggctgaggcaggagaatggcgtgaacctggaaggaagaggttgcagagagccaagattgcg

SEQ ID NO: 60 - protein, 490 aa, Homo sapien
MSEVTKNSLEKILPQLKCHFTWNLFKEDSVSRDLEDRVCNQIEFLNTEFKATMYNLLAYIKHLDGNNEAALECLRQAEELIQQEHADQAEIRSLVTWGNYAWVYYHLGRLSDAQIYVDKVKQTCKKFSNPYSIEYSELDCEEGWTQLKCGRNERAKVCFEKALEEKPNNPEFSSGLAIAMYHLDNHPEKQFSTDVLKQAIELSPDNQYVKVLLGLKLQKMNKEAEGEQFVEEALEKSPCQTDVLRSAAKFYRRKGDLDKAIELFQRVLESTPNNGYLYHQIGCCYKAKVRQMQNTGESEASGNKEMIEALKQYAMDYSNKALEKGLNPLNAYSDLAEFLETECYQTPFNKEVPDAEKQQQSHQRYCNLQKYNGKSEDTAVQHGLEGLSISKKSTDKEEIKDQPQNVSENLLPQNAPNYWYLQGLIHKQNGDLLQAKCYEKELGRLLRDAPSGIGSIFLSASELEDGSEEMGQGAVSSSPRELLSNSEQLN

SEQ ID NO: 61 - DNA, 1584 bp, Homo sapien
cgggatgcggcgcgccgcgcgttgaacctccttggcctgggcgaagctgtgtggaccaagcaagtcaggagtgtggccatgttttctgagcaggctgcccagagggcccacactctactgtccccaccatcagccaacaatgccacctttgcccgggtgccagtggcaacctacaccaactcctcacaacccttccggctaggagagcgcagctttagccggcagtatgcccacatttatgccacccgcctcatccaaatgagacccttcctggagaaccgggcccagcagcactggggcagtggagtgggagtgaagaagctgtgtgaactgcagcctgaggagaagtgctgtgtggtgggcactctgttcaaggccatgccgctgcagccctccatcctgcgggaggtcagcgaggagcacaacctgctcccccagcctcctcggagtaaatacatacacccagatgacgagctggtcttggaagatgaactgcagcgtatcaaactaaaaggcaccattgacgtgtcaaagctggttacggggactgtcctggctgtgtttggctccgtgagagacgacgggaagtttctggtggaggactattgctttgctgaccttgctccccagaagcccgcacccccacttgacacagataggtttgtgctactggtgtccggcctgggcctgggtggcggtggaggcgagagcctgctgggcacccagctgctggtggatgtggtgacggggcagcttggggacgaaggggagcagtgcagcgccgcccacgtctcccgggttatcctcgctggcaacctcctcagccacagcacccagagcagggattctatcaataaggccaaatacctcaccaagaaaacccaggcagccagcgtggaggctgttaagatgctggatgagatcctcctgcagctgagcgcctcagtgcccgtggacgtgatgccaggcgagtttgatcccaccaattacacgctcccccagcagcccctccacccctgcatgttcccgctggccactgcctactccacgctccagctggtcaccaacccctaccaggccaccattgatggagtcagatttttggggacatcaggacagaacgtgagtgacattttccgatacagcagcatggaggatcacttggagatcctggagtggaccctgcgggtccgtcacatcagccccacagccccggacactctaggttgttaccccttctacaaaactgacccgttcatcttcccagagtgcccgcatgtctacttttgtggcaacacccccagctttggctccaaaatcatccgaggtcctgaggaccagacagtgctgttggtgactgtccctgacttcagtgccacgcagaccgcctgccttgtgaacctgcgcagcctggcctgccagcccatcagcttctcgggcttcggggcagaggacgatgacctgggaggcctggggctgggcccctgactcaaaaaagtggttttgaccagagaggcccagatggaggctgttcattccctgcagtgtcggcattgtaaataaagcctggcacttgctgatgcg

SEQ ID NO: 62 - protein, 469 aa, Homo sapien
MFSEQAAQRAHTLLSPPSANNATFARVPVATYTNSSQPFRLGERSFSRQYAHIYATRLIQMRPFLENRAQQHWGSGVGVKKLCELQPEEKCCVVGTLFKAMPLQPSILREVSEEHNLLPQPPRSKYIHPDDELVLEDELQRIKLKGTIDVSKLVTGTVLAVFGSVRDDGKFLVEDYCFADLAPQKPAPPLDTDRFVLLVSGLGLGGGGGESLLGTQLLVDVVTGQLGDEGEQCSAAHVSRVILAGNLLSHSTQSRDSINKAKYLTKKTQAASVEAVKMLDEILLQLSASVPVDVMPGEFDPTNYTLPQQPLHPCMFPLATAYSTLQLVTNPYQATIDGVRFLGTSGQNVSDIFRYSSMEDHLEILEWTLRVRHISPTAPDTLGCYPFYKTDPFIFPECPHVYFCGNTPSFGSKIIRGPEDQTVLLVTVPDFSATQTACLVNLRSLACQPISFSGFGAEDDDLGGLGLGP

SEQ ID NO: 63 - DNA, 3215 bp, Homo sapien
cgggcgtccgcggtggctgcagtcccgtcggtctccctgctgtccggcgcgagctcttcgagtcttgcttgggatgtttcagcagcccctgagaaggaagaggaggaagctgagggcccgctgagggcgcaggacctgagggagtcctacatccagctcgtccagggtgtgcaggagtggcaggatggttgcatgtaccagggggagtttgggttgaacatgaagcttggatatggcaaattctcttggcccacaggcgagtcataccatgggcagttttaccgggaccactgccatggcctgggtacctacatgtggccagatggctccagtttcacgggcacattttacctcagccaccgagaaggctacggcaccatgtacatgaagacacggcttttccaggggctatacaaagcggaccagcggtttgggccaggtgtcgagacctaccccgatggcagccaggacgtggggctgtggttccgagagcagctcatcaagctgtgcacccagatccccagtggcttctccctcctcagataccctgagttctccagcttcatcacccacagccctgccaggatcagcctctcagaagaggagaaaacggagtggggactgcaggagggacaggatccctttttctatgactataagcggtttcttctgaatgacaacctaacgctgcctccagaaatgtatgtctactcgaccaacagtgaccacctgcccatgacaagctctttccgcaaagagctggacgcccgcatcttcctcaatgaaattcctccgttcgttgaggatggagaaccatggttcataatcaatgagacccctttgttggtcaaaatccagaagcaaacttacaagttcaggaacaagccagctcacaccagctggaacatgggcgccatcctggaggggaagcgcagtggctttgcaccctgtgggcccaaagagcaactttccatggagatgatcctaaaggctgaggaagggaaccacgaatggatttgtaggatcctgaaggacaactttgctagtgctgacgtggcggacgcaaagggctacactgtgcttgctgcggctgctactcactgccacaacgacattgtcaaccttctcctggactgtggggccgacgtgaacaagtgctcagatgagggtctcacggcactcagcatgtgtttcctcctccactaccccgcccagtccttcaagcccaatgttgctgaacggaccatacctgagccccaggaacctccaaaattcccagttgttccaatcctttcatcatcatttatggacacaaacctggagtctctgtactatgaggtgaacgtgccttcccagggtagctatgagctgaggccaccgccagcaccactgctcctgccacgcgtctcaggcagccacgagggcggccacttccaggacaccgggcagtgtggggggtccatggaccacaggagcagctctctgaagggggactccccgttggtgaagggcagccttggccatgtggaaagcgggcttgaggacgtgttgggaaacacagaccggggcagtctgtgcagtgctgagacgaaatttgagtccaacgtgtgtgtgtgcgacttctccatcgagctctcgcaggccatgctggagagaagcgcccagtcccacagcttgctgaagatggcctcgccctcaccgtgcaccagcagcttcgacaaagggaccatgcggaggatggcgctgtccatgatcgagcggaggaagcgctggcggaccatcaagctgctgctgcgccggggcgcggaccccaacctgtgctgcgtgcccatgcaggtcctgttccttgctgtgaaggccggggacgtggatggggtgaggctgctgctggagcacggggcgaggaccgacatctgctttccgccgcagctgagcaccctgacaccactccacatcgctgccgcccttcctggggaggagggggtacagattgtggagctgctgttgcatgccatcaccgatgtggacgccaaggcatccgacgaggacgacacttacaagcccggcaagctggacctgctgccctcaagtctgaagctcagcaatgagccaggccctccccaagcctactacagcacggacacagccctcccggaggaggggggcaggacggctctgcacatggcctgcgagcgggaggatgacaacaagtgtgccagggacatagtccggctccttctatcccacggagcaaatcctaacctgctgtggagtggccactccccgctctccctgtccattgccagtgggaatgagctggttgtgaaggagctcctgacccagggagctgaccccaacctgcccctgaccaaaggcttgggcagtgccctgtgtgttgcctgtgacctgacctacgagcaccagaggaacatggacagcaagctggccctgattgaccgactcatcagtcacggggccgacatcctgaagcctgtaatgctcaggcagggagaaaaggaggcagtgggcacagccgtggactatggctacttcagattcttccaggaccggaggattgcccgctgccccttccacacgctgatgccagcagagcgcgagacgttcctggcgcggaagcggctcctggagtacatgggcttgcagctacggcaggctgtctttgccaaggagagccagtgggaccccacgtggctgtacctgtgcaagagagcggagctgatccccagccacaggatgaagaagaagggccccagcctgcccaggggcctggatgtgaaggagcaggggcaaattcccttcttcaagttctgctaccagtgtggccgctccatcggggtccgcctcttgccctgccctcgctgctacgggatcctgacctgcagcaagtactgcaagaccaaggcctggaccgagttccacaagaaggactgcggggacctggtggccatcgtgacacaactggagcaagtttccaggaggagagaagaattccagtgaagcagcagctgcacgtccgaggcttggggaggacccaggactgtgtgggtttcttacctgcctgagccacctcagggaatcttccagcctaatgcaggcatttctgcacctttggggtcatgctttgtagcagtgtctcccttgcgacctcgcaataaattggccccacggggtgattttgacagtcaaaaaaaaaa

SEQ ID NO: 64 - protein, 941 aa, Homo sapien
MYQGEFGLNMKLGYGKFSWPTGESYHGQFYRDHCHGLGTYMWPDGSSFTGTFYLSHREGYGTMYMKTRLFQGLYKADQRFGPGVETYPDGSQDVGLWFREQLIKLCTQIPSGFSLLRYPEFSSFITHSPARISLSEEEKTEWGLQEGQDPFFYDYKRFLLNDNLTLPPEMYVYSTNSDHLPMTSSFRKELDARIFLNEIPPFVEDGEPWFIINETPLLVKIQKQTYKFRNKPAHTSWNMGAILEGKRSGFAPCGPKEQLSMEMILKAEEGNHEWICRILKDNFASADVADAKGYTVLAAAATHCHNDIVNLLLDCGADVNKCSDEGLTALSMCFLLHYPAQSFKPNVAERTIPEPQEPPKFPVVPILSSSFMDTNLESLYYEVNVPSQGSYELRPPPAPLLLPRVSGSHEGGHFQDTGQCGGSMDHRSSSLKGDSPLVKGSLGHVESGLEDVLGNTDRGSLCSAETKFESNVCVCDFSIELSQAMLERSAQSHSLLKMASPSPCTSSFDKGTMRRMALSMIERRKRWRTIKLLLRRGADPNLCCVPMQVLFLAVKAGDVDGVRLLLEHGARTDICFPPQLSTLTPLHIAAALPGEEGVQIVELLLHAITDVDAKASDEDDTYKPGKLDLLPSSLKLSNEPGPPQAYYSTDTALPEEGGRTALHMACEREDDNKCARDIVRLLLSHGANPNLLWSGHSPLSLSIASGNELVVKELLTQGADPNLPLTKGLGSALCVACDLTYEHQRNMDSKLALIDRLISHGADILKPVMLRQGEKEAVGTAVDYGYFRFFQDRRIARCPFHTLMPAERETFLARKRLLEYMGLQLRQAVFAKESQWDPTWLYLCKRAELIPSHRMKKKGPSLPRGLDVKEQGQIPFFKFCYQCGRSIGVRLLPCPRCYGILTCSKYCKTKAWTEFHKKDCGDLVAIVTQLEQVSRRREEFQ

SEQ ID NO: 65 - DNA, 2930 bp, Homo sapien
ggagcccatgatttcctggaagagccctagagctttgctttttctctcctgcagcacttaaccgaaaccagttttgcaatcaattcctgttcaaaggcsaccctactcttcctatccgtctttctccagcccagacactcacagccccctgccagaccaggggacctcggagaggcaaggacagaggttcaggatcttcctctccctcgggacccaaggscacaaaggagagctccgtggagagaagaaaatcatttgactcctggggacacagatttgctgccacagaggctgatggacaaccaggcggagagagaaagtgaggctggtgttggtttgcaaagggatgaggatgacgctcctctgtgtgaagacgtggagctacaagacggagatctgtcccccgaagaaaaaatatttttgagagaatttcccagattgaaagaagatctgaaagggaacattgacaagctccgtgccctcgcagacgatattgacaaaacccacaagaaattcaccaaggctaacatggtggccacctctactgctgtcatctctggagtgatgagcctcctgggtttagcccttgccccagcaacaggaggaggaagcctgctgctctccaccgctggtcaaggtttggcaacagcagctggggtcaccagcatcgtgagtggtacgttggaacgctccaaaaataaagaagcccaagcacgggcggaagacatactgcccacctacgaccaagaggacagggaggatgaggaagagaaggcagactatgtcacagctgctggaaagattatctataatcttagaaacaccttgaagtatgccaagaaaaacgtccgtgcattttggaaactcagagccaacccacgcttggccaatgctaccaagcgtcttctgaccactggccaagtctcctcccggagccgcgtgcaggtgcaaaaggcctttgcgggaacaacactggcgatgaccaaaaatgctcgcgtgctgggaggtgtgatgtccgccttctcccttggctatgacttggccactctctcaaaggaatggaagcacctgaaggaaggagcaaggacaaagtttgcggaagagttgagagccaaggccttggagctggagaggaaactcacagaactcacccagctctacaagagcttgcagcagaaagtgaggtcaagggccagaggggtggggaaggatttaactgggacctgcgaaaccgaggcttactggaaggagttaagggagcatgtgtggatgtggctgtggctgtgtgtgtgtctgtgtgtctgtgtgtatgtacagtttacatgaatgttcctcaggacatggcatacaatggccttggaggtccaaataatatcaagtacatcttggagatgagggtgcctgtcctggacagacctcggcatgccttctgtttctccttcaatgctccttaaggcctatgtgctgggaaaagggtcttccctgtttgtttgtttgtttgtttgtttgtttgttttgagactccagtctgggtgtcagaatgagaccccatctcaaaaaaaaaaaaaaaaaaaaaaaagaagaagaatacagtcatgtatctcttggtgacagggacgcattctgataaatgtgtcattaggcaattgcattgtagtgtgattatcacagattgtacttatacaaaacttagatggcatagcctactgcatacctaggctatatgggagagcctattgctcccaggctacgcacctgtacagcatgtgactactgaatactataggcaattgcagcacaatgggaaatatttgtgtatctaaacatatgtaaacagagaaaaaggaaagtaaaaatatggcataaaagataagaattggctctcctgtacagggcacttactacgaatggagcttgcagggctgagagttgctccagatgagtcagtgagtggtgaatgaatgtgaaggcctagggcattactgtatactactgtaggctttataaacacagcacacttagggtacacaaaatgcatattaaaacattttcttccttcagtatattaggcaataggaatttttcaagtccactataaatcttatcaaaccatggttgtatatgcagttgaccgaaacattgttattggacacataactatagttgaaagaataagcaaaaagtctatctaggtgtgctgtcttgagcaacttttaattattctcctgtcctgcaatatgagttaatcttctctgatcgatgtagattccaggaaggggtgtccaggacaattaccttccttctggagaaacttcccttaatcaaataagagaacttcaaagaaaatccctccctgtgctttggaagggaagggaggtgggcagcagtgggtcagagatagacctttgttctcttatttctgaggcccttcagtctcctttattcaaagcactcagcatgccaaagcaccctattttagggtatctttttctgagccctaaacactgtgttggggatgtcaactgtgacaggaaaatatcttggggccccagaatcactaaggaaaactcaagcttagggaaacttcttagggcaaacccacctcccactctattcaaagttatctctctgctcactgagatagatacatatctgattgcctcctttggaaaggctaatcagaaactcaaaagaatgcaactgtttgtgtctcacctatctgtgacctggaagctccctccccactgaaccaatgttcttcttacatatattgattaatgtcttatgtctccctaaaatgtataaaaccaaggtatgccccaaccatcttggccacatgtcatcaggacttcctgagtctgtgtcacagtgtgtcctcaaccttggcaaaataaactttctaaattaactgagacaaaaaaaaaaaaaaa

SEQ ID NO: 66 - protein, 343 aa, Homo sapien
MDNQAERESEAGVGLQRDEDDAPLCEDVELQDGDLSPEEKIFLREFPRLKEDLKGNIDKLRALADDIDKTHKKFTKANMVATSTAVISGVMSLLGLALAPATGGGSLLLSTAGQGLATAAGVTSIVSGTLERSKNKEAQARAEDILPTYDQEDREDEEEKADYVTAAGKIIYNLRNTLKYAKKNVRAFWKLRANPRLANATKRLLTTGQVSSRSRVQVQKAFAGTTLAMTKNARVLGGVMSAFSLGYDLATLSKEWKHLKEGARTKFAEELRAKALELERKLTELTQLYKSLQQKVRSRARGVGKDLTGTCETEAYWKELREHVWMWLWLCVCLCVCVYVQFT

SEQ ID NO: 67 - DNA, 4040 bp, Homo sapien
tgcagagaacagagaaaggacatctgcgaggaaagttccctgatggctgtcaacaaagtgccacgtctctatggctgtgtacgctgagcacacgattttatcgcgcctatcatatcttggtgcataaacgcacctcacctcggtcaacccttgctccgtcttatgagacaggctttattatccgcattttatatgaggggaatctgacggtggagagagaattatcttgctcaaggcgacacagcagagcccacaggtggcagaatcccacccgagcccgcttcgacccgcggggtggaaaccacgggcgcccgcccggctgcgcttccagagctgaactgagaagcgagtcctctccgccctgcggccaccgcccagccccgacccccgccccggcccgatcctcactcgccgccagctccccgcgcccaccccggagttggtggcgcagaggcgggaggcggaggcgggagggcgggcgctggcaccgggaacgcccgagcgccggcagagagcgcggagagcgcgacacgtgcggcccagagcaccggggccacccggtccccgcaggcccgggaccgcgcccgctggcaggcgacacgtggaagaatacggagttctataccagagttgattgttgatggcacatacttttagaggatgctcattggcatttatgtttataatcacgtggctgttgattaaagcaaaaatagatgcgtgcaagagaggcgatgtgactgtgaagccttcccatgtaattttacttggatccactgtcaatattacatgctctttgaagcccagacaaggctgctttcactattccagacgtaacaagttaatcctgtacaagtttgacagaagaatcaattttcaccatggccactccctcaattctcaagtcacaggtcttccccttggtacaaccttgtttgtctgcaaactggcctgtatcaatagtgatgaaattcaaatatgtggagcagagatcttcgttggtgttgctccagaacagcctcaaaatttatcctgcatacagaagggagaacaggggactgtggcctgcacctgggaaagaggacgagacacccacttatacactgagtatactctacagctaagtggaccaaaaaatttaacctggcagaagcaatgtaaagacatttattgtgactatttggactttggaatcaacctcacccctgaatcacctgaatccaatttcacagccaaggttactgctgtcaatagtcttggaagctcctcttcacttccatccacattcacattcttggacatagtgaggcctcttcctccgtgggacattagaatcaaatttcaaaaggcttccgtgagcagatgtaccctttattggagagatgagggactggtactgcttaatcgactcagatatcggcccagtaacagcaggctctggaatatggttaatgttacaaaggccaaaggaagacatgatttgctggatctgaaaccatttacagaatatgaatttcagatttcctctaagctacatctttataagggaagttggagtgattggagtgaatcattgagagcacaaacaccagaagaagagcctactgggatgttagatgtctggtacatgaaacggcacattgactacagtagacaacagatttctcttttctggaagaatctgagtgtctcagaggcaagaggaaaaattctccactatcaggtgaccttgcaggagctgacaggagggaaagccatgacacagaacatcacaggacacacctcctggaccacagtcattcctagaaccggaaattgggctgtggctgtgtctgcagcaaattcaaaaggcagttctctgcccactcgtattaacataatgaacctgtgtgaggcagggttgctggctcctcgccaggtctctgcaaactcagagggcatggacaacattctggtgacttggcagcctcccaggaaagatccctctgctgttcaggagtacgtggtggaatggagagagctccatccagggggtgacacacaggtccctctaaactggctacggagtcgaccctacaatgtgtctgctctgatttcagagaacataaaatcctacatctgttatgaaatccgtgtgtatgcactctcaggggatcaaggaggatgcagctccatcctgggtaactctaagcacaaagcaccactgagtggcccccacattaatgccatcacagaggaaaaggggagcattttaatttcatggaacagcattccagtccaggagcaaatgggctgcctcctccattataggatatactggaaggaacgggactccaactcccagcctcagctctgtgaaattccctacagagtctcccaaaattcacatccaataaacagcctgcagccccgagtgacatatgtcctgtggatgacagctctgacagctgctggtgaaagttcccacggaaatgagagggaattttgtctgcaaggtaaagccaattggatggcgtttgtggcaccaagcatttgcattgctatcatcatggtgggcattttctcaacgcattacttccagcaaaaggtgtttgttctcctagcagccctcagacctcagtggtgtagcagagaaattccagatccagcaaatagcacttgcgctaagaaatatcccattgcagaggagaagacacagctgcccttggacaggctcctgatagactggcccacgcctgaagatcctgaaccgctggtcatcagtgaagtccttcatcaagtgaccccagttttcagacatcccccctgctccaactggccacaaagggaaaaaggaatccaaggtcatcaggcctctgagaaagacatgatgcacagtgcctcaagcccaccacctccaagagctctccaagctgagagcagacaactggtggatctgtacaaggtgctggagagcaggggctccgacccaaagccagaaaacccagcctgtccctggacggtgctcccagcaggtgaccttcccacccatgatggctacttaccctccaacatagatgacctcccctcacatgaggcacctctcgctgactctctggaagaactggagcctcagcacatctccctttctgttttcccctcaagttctcttcacccactcaccttctcctgtggtgataagctgactctggatcagttaaagatgaggtgtgactccctcatgctctgagtggtgaggcttcaagccttaaagtcagtgtgccctcaaccagcacagcctgccccaattcccccagcccctgctccagcagctgtcatctctgggtgccaccatcggtctggctgcagctagaggacaggcaagccagctctgggggagtcttaggaactgggagttggtcttcactcagatgcctcatcttgcctttcccagggccttaaaattacatccttcactgtgtggacctagagactccaacttgaattcctagtaactttcttggtatgctggccagaaagggaaatgaggaggagagtagaaaccacagctcttagtagtaatggcatacagtctagaggaccattcatgcaatgactatttctaaagcacctgctacacagcaggctgtacacagcagatcagtactgttcaacagaacttcctgagatgatggaaatgttctacctctgcactcactgtccagtacattagacactaggcacattggctgttaatcacttggaatgtgtttagcttgactgaggaattaaattttgattgtaaatttaaatcgccacacatggctagtggctactgtattggagtgcacagctctagatggctcctagattattgagagcctccaaaacaaatcaacctagttctatagatgaagacataaaagacactggtaaacaccaatgtaaaagggcccccaaggtggtcatgactggtctcatttgcagaagtctaagaatgtacctttttctggccgggcgtggtagctcatgcctgtaatcccagcactttgggaggctga

SEQ ID NO: 68 - protein, 862 aa, Homo sapien
MAHTFRGCSLAFMFIITWLLIKAKIDACKRGDVTVKPSHVILLGSTVNITCSLKPRQGCFHYSRRNKLILYKFDRRINFHHGHSLNSQVTGLPLGTTLFVCKLACINSDEIQICGAEIFVGVAPEQPQNLSCIQKGEQGTVACTWERGRDTHLYTEYTLQLSGPKNLTWQKQCKDIYCDYLDFGINLTPESPESNFTAKVTAVNSLGSSSSLPSTFTFLDIVRPLPPWDIRIKFQKASVSRCTLYWRDEGLVLLNRLRYRPSNSRLWNMVNVTKAKGRHDLLDLKPFTEYEFQISSKLHLYKGSWSDWSESLRAQTPEEEPTGMLDVWYMKRHIDYSRQQISLFWKNLSVSEARGKILHYQVTLQELTGGKAMTQNITGHTSWTTVIPRTGNWAVAVSAANSKGSSLPTRINIMNLCEAGLLAPRQVSANSEGMDNILVTWQPPRKDPSAVQEYVVEWRELHPGGDTQVPLNWLRSRPYNVSALISENIKSYICYEIRVYALSGDQGGCSSILGNSKHKAPLSGPHINAITEEKGSILISWNSIPVQEQMGCLLHYRIYWKERDSNSQPQLCEIPYRVSQNSHPINSLQPRVTYVLWMTALTAAGESSHGNEREFCLQGKANWMAFVAPSICIAIIMVGIFSTHYFQQKVFVLLAALRPQWCSREIPDPANSTCAKKYPIAEEKTQLPLDRLLIDWPTPEDPEPLVISEVLHQVTPVFRHPPCSNWPQREKGIQGHQASEKDMMHSASSPPPPRALQAESRQLVDLYKVLESRGSDPKPENPACPWTVLPAGDLPTHDGYLPSNIDDLPSHEAPLADSLEELEPQHISLSVFPSSSLHPLTFSCGDKLTLDQLKMRCDSLML

SEQ ID NO: 69 - DNA, 658 bp, Homo sapien
aagactgtaggagcatctggtgggaggtggtggagggagaactgtgggtttggaagctgcgccctccccccagccatgcgttggaacaggaacagttacatggagaacaaccttaccttgtccgacaccctcagatctttgtcccaggccaagaatcttttaatgacaggatcctctgtgattagagagcagatgtcagtgtgagaagcaggacagggtttccgtgggagcagcagggcagggaggagaagtgtgcctcccggggggaagtctcaggattgtggccgcgggtgaggtggatgggagaggggagaatgactttcactgggcaagggagagaggctcctgctctgagactcccctgagaagaggccgaaggaggccctgggtgtgagaatctacaggatgtagagctgggaatcagccaggaccccctccagcagacacggagggaccactgcagagtcataaaggaattcccatcatttcctcatgagacagtcacatcagggtgtgaccatggccttggtatcccccactatggatggagacacttaggtttagaaaagtcagtaagagacattaagtttcagagggcacagctgaaaccactttctttgtttattgattttgtttttctttatttgatttttatttt

SEQ ID NO: 70 - protein, 67 aa, Homo sapien
KTVGASGGRWWRENCGFGSCALPPAMRWNRNSYMENNLTLSDTLRSLSQAKNLLMTGSSVIREQMSV

SEQ ID NO: 71 - DNA, 1047 bp, Homo sapien
atggcagagattggtgaggatttggataaatctgatgtgtcctcattaattttcctcatgaaggattacatgggccgaggcaagataagcaaggagaagagtttcttggaccttgtggttgagttggagaaactaaatctggttgccccagatcaactggatttattagaaaaatgcctaaagaacatccacagaatagacctgaagacaaaaatccagaagtacaagcagtctgttcaaggagcagggacaagttacaggaatgttctccaagcagcaatccaaaagagtctcaaggatccttcaaataacttcagggaagaaccagtgaagaaatccattcaggaatcagaagcttttttgcctcagagcatacctgaagagagatacaagatgaagagcaagcccctaggaatctgcctgataatcgattgcattggcaatgagacagagcttcttcgagacaccttcacttccctgggctatgaagtccagaaattcttgcatctcagtatgcatggtatatcccagattcttggccaatttgcctgtatgcccgagcaccgagactacgacagctttgtgtgtgtcctggtgagccgaggaggctcccagagtgtgtatggtgtggatcagactcactcagggctccccctgcatcacatcaggaggatgttcatgggagattcatgcccttatctagcagggaagccaaagatgttttttattcagaactatgtggtgtcagacggccagctggaggacagcagcctcttggaggtggatgggccagcgatgaagaatgtggaattcaaggctcagaagcgagggctgtgcacagttcaccgagaagctgacttcttctggagcctgtgtactgcggacatgtccctgctggagcagtctcacagctcaccgtccctgtacctgcagtgcctctcccagaaactgagacaagaaagggggacaattcccggaagtggaattacagagtcaaaggacatgcatttttcaagcctcggatgcatcttactagatgtcctatag

SEQ ID NO: 72 - protein, 348 aa, Homo sapien
MAEIGEDLDKSDVSSLIFLMKDYMGRGKISKEKSFLDLVVELEKLNLVAPDQLDLLEKCLKNIHRIDLKTKIQKYKQSVQGAGTSYRNVLQAAIQKSLKDPSNNFREEPVKKSIQESEAFLPQSIPEERYKMKSKPLGICLIIDCIGNETELLRDTFTSLGYEVQKFLHLSMHGISQILGQFACMPEHRDYDSFVCVLVSRGGSQSVYGVDQTHSGLPLHHIRRMFMGDSCPYLAGKPKMFFIQNYVVSDGQLEDSSLLEVDGPAMKNVEFKAQKRGLCTVHREADFFWSLCTADMSLLEQSHSSPSLYLQCLSQKLRQERGTIPGSGITESKDMHFSSLGCILLDVL

SEQ ID NO: 73 - DNA, 1193 bp, Homo sapien
tgaagatcagctattagaagagaaagatcagttaagtcctttggacctgatcagcttgatacaagaactactgatttcaacttctttggcttaattctctcggaaacgatgaaatatacaagttatatcttggcttttcagctctgcatcgttttgggttctcttggctgttactgccaggacccatatgtaaaagaagcagaaaaccttaagaaatattttaatgcaggtcattcagatgtagcggataatggaactcttttcttaggcattttgaagaattggaaagaggagagtgacagaaaaataatgcagagccaaattgtctccttttacttcaaactttttaaaaactttaaagatgaccagagcatccaaaagagtgtggagaccatcaaggaagacatgaatgtcaagtttttcaatagcaacaaaaagaaacgagatgacttcgaaaagctgactaattattcggtaactgacttgaatgtccaacgcaaagcaatacatgaactcatccaagtgatggctgaactgtcgccagcagctaaaacagggaagcgaaaaaggagtcagatgctgtttcaaggtcgaagagcatcccagtaatggttgtcctgcctgcaatatttgaattttaaatctaaatctatttattaatatttaacattatttatatggggaatatatttttagactcatcaatcaaataagtatttataatagcaacttttgtgtaatgaaaatgaatatctattaatatatgtattatttataattcctatatcctgtgactgtctcacttaatcctttgttttctgactaattaggcaaggctatgtgattacaaggctttatctcaggggccaactaggcagccaacctaagcaagatcccatgggttgtgtgtttatttcacttgatgatacaatgaacacttataagtgaagtgatactatccagttactgccggtttgaaaatatgcctgcaatctgagccagtgctttaatggcatgtcagacagaacttgaatgtgtcaggtgaccctgatgaaaacatagcatctcaggagatttcatgcctggtgcttccaaatattgttgacaactgtgactgtacccaaatggaaagtaactcatttgttaaaattatcaatatctaatatatatgaataaagtgtaagttcacaact

SEQ ID NO: 74 - protein, 166 aa, Homo sapien
MKYTSYILAFQLCIVLGSLGCYCQDPYVKEAENLKKYFNAGHSDVADNGTLFLGILKNWKEESDRKIMQSQIVSFYFKLFKNFKDDQSIQKSVETIKEDMNVKFFNSNKKKRDDFEKLTNYSVTDLNVQRKAIHELIQVMAELSPAAKTGKRKRSQMLFQGRRASQ

SEQ ID NO: 75 - DNA, 6450 bp, Homo sapien
gagttgtgcctggagtgatgtttaagccaatgtcagggcaaggcaacagtccctggccgtcctccagcacctttgtaatgcatatgagctcgggagaccagtacttaaagttggaggcccgggagcccaggagctggcggagggcgttcgtcctgggagctgcacttgctccgtcgggtcgccggcttcaccggaccgcaggctcccggggcagggccggggccagagctcgcgtgtcggcgggacatgcgctgcgtcgcctctaacctcgggctgtgctctttttccaggtggcccgccggtttctgagccttctgccctgcggggacacggtctgcaccctgcccgcggccacggaccatgaccatgaccctccacaccaaagcatctgggatggccctactgcatcagatccaagggaacgagctggagcccctgaaccgtccgcagctcaagatccccctggagcggcccctgggcgaggtgtacctggacagcagcaagcccgccgtgtacaactaccccgagggcgccgcctacgagttcaacgccgcggccgccgccaacgcgcaggtctacggtcagaccggcctcccctacggccccgggtctgaggctgcggcgttcggctccaacggcctggggggtttccccccactcaacagcgtgtctccgagcccgctgatgctactgcacccgccgccgcagctgtcgcctttcctgcagccccacggccagcaggtgccctactacctggagaacgagcccagcggctacacggtgcgcgaggccggcccgccggcattctacaggccaaattcagataatcgacgccagggtggcagagaaagattggccagtaccaatgacaagggaagtatggctatggaatctgccaaggagactcgctactgtgcagtgtgcaatgactatgcttcaggctaccattatggagtctggtcctgtgagggctgcaaggccttcttcaagagaagtattcaaggacataacgactatatgtgtccagccaccaaccagtgcaccattgataaaaacaggaggaagagctgccaggcctgccggctccgcaaatgctacgaagtgggaatgatgaaaggtgggatacgaaaagaccgaagaggagggagaatgttgaaacacaagcgccagagagatgatggggagggcaggggtgaagtggggtctgctggagacatgagagctgccaacctttggccaagcccgctcatgatcaaacgctctaagaagaacagcctggccttgtccctgacggccgaccagatggtcagtgccttgttggatgctgagccccccatactctattccgagtatgatcctaccagacccttcagtgaagcttcgatgatgggcttactgaccaacctggcagacagggagctggttcacatgatcaactgggcgaagagggtgccaggctttgtggatttgaccctccatgatcaggtccaccttctagaatgtgcctggctagagatcctgatgattggtctcgtctggcgctccatggagcacccagtgaagctactgtttgctcctaacttgctcttggacaggaaccagggaaaatgtgtagagggcatggtggagatcttcgacatgctgctggctacatcatctcggttccgcatgatgaatctgcagggagaggagtttgtgtgcctcaaatctattattttgcttaattctggagtgtacacatttctgtccagcaccctgaagtctctggaagagaaggaccatatccaccgagtcctggacaagatcacagacactttgatccacctgatggccaaggcaggcctgaccctgcagcagcagcaccagcggctggcccagctcctcctcatcctctcccacatcaggcacatgagtaacaaaggcatggagcatctgtacagcatgaagtgcaagaacgtggtgcccctctatgacctgctgctggagatgctggacgcccaccgcctacatgcgcccactagccgtggaggggcatccgtggaggagacggaccaaagccacttggccactgcgggctctacttcatcgcattccttgcaaaagtattacatcacgggggaggcagagggtttccctgccacagtctgagagctccctggctcccacacggttcagataatccctgctgcattttaccctcatcatgcaccactttagccaaattctgtctcctgcatacactccggcatgcatccaacaccaatggctttctagatgagtggccattcatttgcttgctcagttcttagtggcacatcttctgtcttctgttgggaacagccaaagggattccaaggctaaatctttgtaacagctctctttcccccttgctatgttactaagcgtgaggattcccgtagctcttcacagctgaactcagtctatgggttggggctcagataactctgtgcatttaagctacttgtagagacccaggcctggagagtagacattttgcctctgataagcactttttaaatggctctaagaataagccacagcaaagaatttaaagtggctcctttaattggtgacttggagaaagctaggtcaagggtttattatagcaccctcttgtattcctatggcaatgcatccttttatgaaagtggtacaccttaaagcttttatatgactgtagcagagtatctggtgattgtcaattcacttccccctataggaatacaaggggccacacagggaaggcagatcccctagttggccaagacttattttaacttgatacactgcagattcagagtgtcctgaagctctgcctctggctttccggtcatgggttccagttaattcatgcctcccatggacctatggagagcaacaagttgatcttagttaagtctccctatatgagggataagttcctgatttttgtttttatttttgtgttacaaaagaaagccctccctccctgaacttgcagtaaggtcagcttcaggacctgttccagtgggcactgtacttggatcttcccggcgtgtgtgtgccttacacaggggtgaactgttcactgtggtgatgcatgatgagggtaaatggtagttgaaaggagcaggggccctggtgttgcatttagccctggggcatggagctgaacagtacttgtgcaggattgttgtggctactagagaacaagagggaaagtagggcagaaactggatacagttctgagcacagccagacttgctcaggtggccctgcacaggctgcagctacctaggaacattccttgcagaccccgcattgcctttgggggtgccctgggatccctggggtagtccagctcttattcatttcccagcgtggccctggttggaagaagcagctgtcaagttgtagacagctgtgttcctacaattggcccagcaccctggggcacgggagaagggtggggaccgttgctgtcactactcaggctgactggggcctggtcagattacgtatgcccttggtggtttagagataatccaaaatcagggtttggtttggggaagaaaatcctcccccttcctcccccgccccgttccctaccgcctccactcctgccagctcatttccttcaatttcctttgacctataggctaaaaaagaaaggctcattccagccacagggcagccttccctgggcctttgcttctctagcacaattatgggttacttcctttttcttaacaaaaaagaatgtttgatttcctctgggtgaccttattgtctgtaattgaaaccctattgagaggtgatgtctgtgttagccaatgacccaggtagctgctcgggcttctcttggtatgtcttgtttggaaaagtggatttcattcatttctgattgtccagttaagtgatcaccaaaggactgagaatctgggagggcaaaaaaaaaaaaaaaagtttttatgtgcacttaaatttggggacaattttatgtatctgtgttaaggatatgcttaagaacataattcttttgttgctgtttgtttaagaagcaccttagtttgtttaagaagcaccttatatagtataatatatatttttttgaaattacattgcttgtttatcagacaattgaatgtagtaattctgttctggatttaatttgactgggttaacatgcaaaaaccaaggaaaaatatttagtttttttttttttttttgtatacttttcaagctaccttgtcatgtatacagtcatttatgcctaaagcctggtgattattcatttaaatgaagatcacatttcatatcaacttttgtatccacagtagacaaaatagcactaatccagatgcctattgttggatattgaatgacagacaatcttatgtagcaaagattatgcctgaaaaggaaaattattcagggcagctaattttgcttttaccaaaatatcagtagtaatatttttggacagtagctaatgggtcagtgggttctttttaatgtttatacttagattttcttttaaaaaaattaaaataaaacaaaaaaaatttctaggactagacgatgtaataccagctaaagccaaacaattatacagtggaaggttttacattattcatccaatgtgtttctattcatgttaagatactactacatttgaagtgggcagagaacatcagatgattgaaatgttcgcccaggggtctccagcaactttggaaatctctttgtatttttacttgaagtgccactaatggacagcagatattttctggctgatgttggtattgggtgtaggaacatgatttaaaaaaaaaactcttgcctctgctttcccccactctgaggcaagttaaaatgtaaaagatgtgatttatctggggggctcaggtatggtggggaagtggattcaggaatctggggaatggcaaatatattaagaagagtattgaaagtatttggaggaaaatggttaattctgggtgtgcaccaaggttcagtagagtccacttctgccctggagaccacaaatcaactagctccatttacagccatttctaaaatggcagcttcagttctagagaagaaagaacaacatcagcagtaaagtccatggaatagctagtggtctgtgtttcttttcgccattgcctagcttgccgtaatgattctataatgccatcatgcagcaattatgagaggctaggtcatccaaagagaagaccctatcaatgtaggttgcaaaatctaacccctaaggaagtgcagtctttgatttgatttccctagtaaccttgcagatatgtttaaccaagccatagcccatgccttttgagggctgaacaaataagggacttactgataatttacttttgatcacattaaggtgttctcaccttgaaatcttatacactgaaatggccattgatttaggccactggcttagagtactccttcccctgcatgacactgattacaaatactttcctattcatactttccaattatgagatggactgtgggtactgggagtgatcactaacaccatagtaatgtctaatattcacaggcagatctgcttggggaagctagttatgtgaaaggcaaataaagtcatacagtagctcaaaaggcaaccataattctctttggtgcaagtcttgggagcgtgatctagattacactgcaccattcccaagttaatcccctgaaaacttactctcaactggagcaaatgaactttggtcccaaatatccatcttttcagtagcgttaattatgctctgtttccaactgcatttcctttccaattgaattaaagtgtggcctcgtttttagtcatttaaaattgttttctaagtaattgctgcctctattatggcacttcaattttgcactgtcttttgagattcaagaaaaatttctattcatttttttgcatccaattgtgcctgaacttttaaaatatgtaaatgctgccatgttccaaacccatcgtcagtgtgtgtgtttagagctgtgcaccctagaaacaacatacttgtcccatgagcaggtgcctgagacacagacccctttgcattcacagagaggtcattggttatagagacttgaattaataagtgacattatgccagtttctgttctctcacaggtgataaacaatgctttttgtgcactacatactcttcagtgtagagctcttgttttatgggaaaaggctcaaatgccaaattgtgtttgatggattaatatgcccttttgccgatgcatactattactgatgtgactcggttttgtcgcagctttgctttgtttaatgaaacacacttgtaaacctcttttgcactttgaaaaagaatccagcgggatgctcgagcacctgtaaacaattttctcaacctatttgatgttcaaataaagaattaaact

SEQ ID NO: 76 - protein, 595 aa, Homo sapien
MTMTLHTKASGMALLHQIQGNELEPLNRPQLKIPLERPLGEVYLDSSKPAVYNYPEGAAYEFNAAAAANAQVYGQTGLPYGPGSEAAAFGSNGLGGFPPLNSVSPSPLMLLHPPPQLSPFLQPHGQQVPYYLENEPSGYTVREAGPPAFYRPNSDNRRQGGRERLASTNDKGSMAMESAKETRYCAVCNDYASGYHYGVWSCEGCKAFFKRSIQGHNDYMCPATNQCTIDKNRRKSCQACRLRKCYEVGMMKGGIRKDRRGGRMLKHKRQRDDGEGRGEVGSAGDMRAANLWPSPLMIKRSKKNSLALSLTADQMVSALLDAEPPILYSEYDPTRPFSEASMMGLLTNLADRELVHMINWAKRVPGFVDLTLHDQVHLLECAWLEILMIGLVWRSMEHPVKLLFAPNLLLDRNQGKCVEGMVEIFDMLLATSSRFRMMNLQGEEFVCLKSIILLNSGVYTFLSSTLKSLEEKDHIHRVLDKITDTLIHLMAKAGLTLQQQHQRLAQLLLILSHIRHMSNKGMEHLYSMKCKNVVPLYDLLLEMLDAHRLHAPTSRGGASVEETDQSHLATAGSTSSHSLQKYYITGEAEGFPATV

SEQ ID NO: 77 - DNA, 891 bp, Homo sapien
  Unknown 647-687, 750-795: unknown nucleic acid
  unsure 750-795: unknown base
cgtgctgtagctggttcttacgtccaacctgggggcagtctgcccagatcgcctgcctggcctcgcctctgcccatcagacacttggtgctggaatctccgaggctgggagggactgggagcgccccagttctgtgtcctccccacacagccccttttatgtaacttgactaagatcaagcagttagtaaatggtagaaagaatatttgaatctacctagtgagtctctagtgcatgcttttgtccggtatcctggaaagcctcccacaaaaagctaatctttgccccattcaaaacatgcaccctgaagaagctgtttgtacaggattgggtttattctgttattaagacaaaggcatcatggcctttgggtgagaggcccgtatgtgtttgggatttggcaatcagcattccatctctgtcatcaccattattgagaaaatagatggattggttccctctctgcagtcctgtggagcagttggactgctctctctgctctcaggatgatactgtgagaacaatttaaatatgctaagcacatgtcaggaaacagttttgtggtctttggacactcgctgtagccattccgttccatttcaggtgattttattcatttcatttgtagaataaaataaatccatttnnnnnnnnnnnnnnnnnnnnnnnnnnnnnnnnnnnnnnnnntatacaccactaaagcctcccattaaacccatagaagacttaaagagctaaaagaggctattnnnnnnnnnnnnnnnnnnnnnnnnnnnnnnnnnnnnnnnnnnnnnnattattaggcacggcatcttgttttacacaacgtgtttgatcttcacttcttcttaatatttggtgtttgatcttctcacaagtggttttgcttgc

SEQ ID NO: 78 - protein, 69 aa, Homo sapien
RAVAGSYVQPGGSLPRSPAWPRLCPSDTWCWNLRGWEGLGAPQFCVLPTQPLLCNLTKIKQLVNGRKNI

SEQ ID NO: 79 - DNA, 1991 bp, Homo sapien
acaggggtgaaggcccagagaccagcagaacggcatcccagccacgacggccactttgctctgtctgctgtccgccacggccctgctctgttccctgggacacccccgcccccacctcctcaggctgcctgatctgcccagctttccagctttcctctggattccggcctctggtcatccctccccaccctctctccaaggccctctcctggtctcccttcttctagaaccccttcctccacctccctctctgcagaacttctcctttaccccccaccccccaccactgccccctttccttttctgacctccttttggagggctcagcgctgcccagaccataggagagatgtgggaggctcagttcctgggcttgctgtttctgcagccgctttgggtggctccagtgaagcctctccagccaggggctgaggtcccggtggtgtgggcccaggagggggctcctgcccagctcccctgcagccccacaatccccctccaggatctcagccttctgcgaagagcaggggtcacttggcagcatcagccagacagtggcccgcccgctgccgcccccggccatcccctggcccccggccctcacccggcggcgccctcctcctgggggcccaggccccgccgctacacggtgctgagcgtgggtcccggaggcctgcgcagcgggaggctgcccctgcagccccgcgtccagctggatgagcgcggccggcagcgcggggacttctcgctatggctgcgcccagcccggcgcgcggacgccggcgagtaccgcgccgcggtgcacctcagggaccgcgccctctcctgccgcctccgtctgcgcctgggccaggcctcgatgactgccagccccccaggatctctcagagcctccgactgggtcattttgaactgctccttcagccgccctgaccgcccagcctctgtgcattggttccggaaccggggccagggccgagtccctgtccgggagtccccccatcaccacttagcggaaagcttcctcttcctgccccaagtcagccccatggactctgggccctggggctgcatcctcacctacagagatggcttcaacgtctccatcatgtataacctcactgttctgggtctggagcccccaactcccttgacagtgtacgctggagcaggttccagggtggggctgccctgccgcctgcctgctggtgtggggacccggtctttcctcactgccaagtggactcctcctgggggaggccctgacctcctggtgactggagacaatggcgactttacccttcgactagaggatgtgagccaggcccaggctgggacctacacctgccatatccatctgcaggaacagcagctcaatgccactgtcacattggcaatcatcacagtgactcccaaatcctttgggtcacctggatccctggggaagctgctttgtgaggtgactccagtatctggacaagaacgctttgtgtggagctctctggacaccccatcccagaggagtttctcaggaccttggctggaggcacaggaggcccagctcctttcccagccttggcaatgccagctgtaccagggggagaggcttcttggagcagcagtgtacttcacagagctgtctagcccaggtgcccaacgctctgggagagccccaggtgccctcccagcaggccacctcctgctgtttctcacccttggtgtcctttctctgctccttttggtgactggagcctttggctttcacctttggagaagacagtggcgaccaagacgattttctgccttagagcaagggattcaccctccgcaggctcagagcaagatagaggagctggagcaagaaccggagccggagccggagccggaaccggagcccgagcccgagcccgagccggagcagctctgacctggagctgaggcagccagcagatctcagcagcccagtccaaataaacgtcctgtctagcagc

SEQ ID NO: 80 - protein, 529 aa, Homo sapien
MWEAQFLGLLFLQPLWVAPVKPLQPGAEVPVVWAQEGAPAQLPCSPTIPLQDLSLLRRAGVTWQHQPDSGPPAAAPGHPLAPGPHPAAPSSWGPRPRRYTVLSVGPGGLRSGRLPLQPRVQLDERGRQRGDFSLWLRPARRADAGEYRAAVHLRDRALSCRLRLRLGQASMTASPPGSLRASDWVILNCSFSRPDRPASVHWFRNRGQGRVPVRESPHHHLAESFLFLPQVSPMDSGPWGCILTYRDGFNVSIMYNLTVLGLEPPTPLTVYAGAGSRVGLPCRLPAGVGTRSFLTAKWTPPGGGPDLLVTGDNGDFTLRLEDVSQAQAGTYTCHIHLQEQQLNATVTLAIITVTPKSFGSPGSLGKLLCEVTPVSGQERFVWSSLDTPSQRSFSGPWLEAQEAQLLSQPWQCQLYQGERLLGAAVYFTELSSPGAQRSGRAPGALPAGHLLLFLTLGVLSLLLLVTGAFGFHLWRRQWRPRRFSALEQGIHPRQAQTQDRGAGARTGAGAGAGTGARARARAGAALTWS

SEQ ID NO: 81 - DNA, 1358 bp, Homo sapien
ggcgtccgcgcgctgcacaatggcggctctgaagagttggctgtcgcgcagcgtaacttcattcttcaggtacagacagtgtttgtgtgttcctgttgtggctaactttaagaagcggtgtttctcagaattgataagaccatggcacaaaactgtgacgattggctttggagtaaccctgtgtgcggttcctattgcacagaaatcagagcctcattcccttagtagtgaagcattgatgaggagagcagtgtctttggtaacagatagcacctctacctttctctctcagaccacatatgcgttgattgaagctattactgaatatactaaggctgtttataccttaacttctctttaccgacaatatacaagtttacttgggaaaatgaattcagaggaggaagatgaagtgtggcaggtgatcataggagccagagctgagatgacttcaaaacaccaagagtacttgaagctggaaaccacttggatgactgcagttggtctttcagagatggcagcagaagctgcatatcaaactggcgcagatcaggcctctataaccgccaggaatcacattcagctggtgaaactgcaggtggaagaggtgcaccagctctcccggaaagcagaaaccaagctggcagaagcacagatagaagagctccgtcagaaaacacaggaggaaggggaggagcgggctgagtcggagcaggaggcctacctgcgtgaggattgagggcctgagcacactgccctgtctccccactcagtggggaaagcaggggcagatgccaccctgcccagggttggcatgactgtctgtgcaccgagaagaggcggcaggtcctgccctggccaatcaggcgagacgcctttgtgagctgtgagtgcctcctgtggtctcaggcttgcgctggacctggttcttagcccttgggcactgcaccctgtttaacatttcaccccactctgtacagctgctcttacccattttttttacctcacacccaaagcattttgcctacctgggtcagagagaggagtcctttttgtcatgcccttaagttcagcaactgtttaacctgttttcagtcttatttacgtcgtcaaaaatgatttagtacttgttccctctgttgggatgccagttgtggcagggggaggggaacctgtccagtttgtacgatttctttgtatgtatttctgatgtgttctctgatctgcccccactgtcctgtgaggacagctgaggccaaggagtgaaaaacctattactactaagagaaggggtgcagagtgtttacctggtgctctcaacaggacttaacatcaacaggacttaacacagaaaaaaa

SEQ ID NO: 82 - protein, 239 aa, Homo sapien
MAALKSWLSRSVTSFFRYRQCLCVPVVANFKKRCFSELIRPWHKTVTIGFGVTLCAVPIAQKSEPHSLSSEALMRRAVSLVTDSTSTFLSQTTYALIEAITEYTKAVYTLTSLYRQYTSLLGKMNSEEEDEVWQVIIGARAEMTSKHQEYLKLETTWMTAVGLSEMAAEAAYQTGADQASITARNHIQLVKLQVEEVHQLSRKAETKLAEAQIEELRQKTQEEGEERAESEQEAYLRED

SEQ ID NO: 83 - DNA, 1650 bp, Homo sapien
actttcctgccccttccccggccaagcccaactccggatctcgctctccaccggatctcacccgccacacccggacaggcggctggaggaggcgggcgtctaaaattctgggaagcagaacctggccggagccactagacagagccgggcctagcccagagacatggagagttgctacaacccaggtctggatggtattattgaatatgatgatttcaaattgaactcctccattgtggaacccaaggagccagccccagaaacagctgatggcccctacctggtgatcgtggaacagcctaagcagagaggcttccgatttcgatatggctgtgaaggcccctcccatggaggactgcccggtgcctccagtgagaagggccgaaagacctatcccactgtcaagatctgtaactacgagggaccagccaagatcgaggtggacctggtaacacacagtgacccacctcgtgctcatgcccacagtctggtgggcaagcaatgctcggagctggggatctgcgccgtttctgtggggcccaaggacatgactgcccaatttaacaacctgggtgtcctgcatgtgactaagaagaacatgatggggactatgatacaaaaacttcagaggcagcggctccgctctaggccccagggccttacggaggccgagcagcgggagctggagcaagaggccaaagaactgaagaaggtgatggatctgagtatagtgcggctgcgcttctctgccttccttagagccagtgatggctccttctccctgcccctgaagccagtcacctcccagcccatccatgatagcaaatctccgggggcatcaaacctgaagatttctcgaatggacaagacagcaggctctgtgcggggtggagatgaagtttatctgctttgtgacaaggtgcagaaagatgacattgaggttcggttctatgaggatgatgagaatggatggcaggcctttggggacttctctcccacagatgtgcataaacagtatgccattgtgttccggacacccccctatcacaagatgaagattgagcggcctgtaacagtgtttctgcaactgaaacgcaagcgaggaggggacgtgtctgattccaaacagttcacctattaccctctggtggaagacaaggaagaggtgcagcggaagcggaggaaggccttgcccaccttctcccagcccttcgggggtggctcccacatgggtggaggctctgggggtgcagccgggggctacggaggagctggaggaggtgagggggtactgatggagggaggggtaaaggtaagagaagctgtggaggaaaaaaatctgggggaggccgggcgtggcttgcacgcctgtaatccagcctttgggaggccaaggcaggcagttacctgagatcaggagttcaagaccagcttggccaacagcgtgaaacctcgtctctactaaaaatacaaacattagctgggcatggtggcaggcgcctgtaatcccagctactcgggaggctgaggcaggagaatcgcttgaaccctgggagacaagaggttgcagtaagctgagatcacaccactgcactccaggctgggcaataagagcgaaactccgtctcaaaaaaaaaaaaaaaaaaaaaa

SEQ ID NO: 84 - protein, 415 aa, Homo sapien
MESCYNPGLDGIIEYDDFKLNSSIVEPKEPAPETADGPYLVIVEQPKQRGFRFRYGCEGPSHGGLPGASSEKGRKTYPTVKICNYEGPAKIEVDLVTHSDPPRAHAHSLVGKQCSELGICAVSVGPKDMTAQFNNLGVLHVTKKNMMGTMIQKLQRQRLRSRPQGLTEAEQRELEQEAKELKKVMDLSIVRLRFSAFLRASDGSFSLPLKPVTSQPIHDSKSPGASNLKISRMDKTAGSVRGGDEVYLLCDKVQKDDIEVRFYEDDENGWQAFGDFSPTDVHKQYAIVFRTPPYHKMKIERPVTVFLQLKRKRGGDVSDSKQFTYYPLVEDKEEVQRKRRKALPTFSQPFGGGSHMGGGSGGAAGGYGGAGGGEGVLMEGGVKVREAVEEKNLGEAGRGLHACNPAFGRPRQAVT

SEQ ID NO: 85 - DNA, 3791 bp, Homo sapien
  unsure 2659-2677, 2734-3054: unknown base
cactgtgctttcagcttgagtgacagagtgagaccctcctgactcaaaacaaaaaacatggtttctcctctctctcctgtcttcttactctctatcccatttgatgtagtgatttttaaatgcttttgtaagttaattcttaacacaaaagagacattgtaatgaggcacaccactaaagtgagcatgcccaattaaaaccagtgtaatataggataagaaaatctgatttttcaaaaaagatactctacataaagaatccttcatataaaaagttctttcttgtagtacatttaaagttttaattcactcatgtataactgagagttcctttgagccctttttaggcagggaggcatgtctgtcatctagcgtgtggcccagtaagtgattattacattggaatcagtttttcagtcttttaaaataaattctgtgccataagaataaaagataaagagaaaaattaatgttaactatttttagcttattataactatgtcaacaagtgtttattaatacctattatgggaaagtcactgtggttggcattgaaaattacatcatctttaaagcagtatttgtccccagatggactcatcactagcaaagactaggttcattggaaggcatagggtgagagaatgggaagatggagtggaggcgggttgttaaagtgctgtcagtgagtgattttgtctacttgaataatggtccatgtttgggggcatattgtgtttcataagaagtgaaaggtatttgcaaagtaagctacaaatgacccataaatctgttaacaacagtccttaatatgcaaagatgaaaaacaagcattactgctacccaaagggaactggtgcttggtgatgtgcagatggggctgttggttaagagagctattacaggttttctctcttaggtttcataggaggtagttactgagatgagattgttttatctttttgaatacagatctcttgtcttgagttagttctgaggatgggagtaataaaggagttttttgtttttttgtttgtttgtttgttttggctccttagtaatactcctctgacatttatttctattattcttcaaagaaaggaaaccaactgaaatgtttgctttaacaaacattttaataagttctctgggtttttttttccccttttaaaaaaattagcatataccatagcaataaaagaactaatgttaactattgtatgctacaacttaagtgatttttctaaagaagcacaatgtcattgaaagtattattgaaaaggatcatagtcacattgaatttgtgaaggccaaagaaattgaagggagtgatattttcattttatgatattcacatatttagtaaattttgtgtacaagaataccaggcagagtgttttacccatggaaacaggtttcagattactttgtttttactgttagagtctcaagtttagaaatgctaacacttaaatcagtttttttctcactatacttgaagattgttaatattttgatatcttcctagcttgatgaatttaaacatatcttcagatctgtgacagtgacagccaataggactgataatattagcttcaaaccaataatatccagggttaaaataaaaatcatagtgaaagtacgattgtaaaattatgctatattaacttttaagtctgtaataacttgacatcaaaatgttatgtaattaccataaataatggctagcgagaacatctttggaaattctcaaattacctttcttactacactgtttgcagaatgaatgtagaaatgatcctgttagctttctgaatgttctgtggttgaatgtgtttttgcttaaataaagcttttggtatttgtttaaattacacttcttgagaagtggaaattttaggatcatctttgctttgtttcagttttgtgatttttgaaatgaatgtttagtttactgagccagttggtcatttcttcctcatgtcgttaagtccagtgagtaagcctgaactgtgaataaattaccaaaaacttgcttagaatttcattttgaagcaatttgctaatatttgaagtgtatacacatttgtagttatgttaaaaattgtattgtactaagaatgtaatcaatgtctactttagttgtaaacatttctgatgtcaaaactttattcattactgttgattttaagaatacgaaatcactgcctaaatattaccaaaagccactgtctctacccgaacttcccagtttgggaaagaatcgttagataaaacaaaggctctgccctttctgataccaaactccacagatactttctcacatcttttaaaacattttgcaataacatattgtttataggaagtttacagggtatgcaatgattaaaacttttaagtgaattgatagttgcaaaagaaaggataatatttaaggtcagtgagtagcaagacaatctaaagtttctgtaatatctggctctctgttaattatagagcaaagtttcccttacagaatccttttatgaacagcaagctagagtctatccctagtggttatagcacctgctgcgtttttcaggagacagttaggccagggtgatttgaatggatagatgtgctgttttgcctgcttgtagaattcagcccagtctttggcnnnnnnnnnnnnnnnnnnnctccacctctccctctctcttcttctgcaccagagcctaaggctgcgccaccaagannnnnnnnnnnnnnnnnnnnnnnnnnnnnnnnnnnnnnnnnnnnnnnnnnnnnnnnnnnnnnnnnnnnnnnnnnnnnnnnnnnnnnnnnnnnnnnnnnnnnnnnnnnnnnnnnnnnnnnnnnnnnnnnnnnnnnnnnnnnnnnnnnnnnnnnnnnnnnnnnnnnnnnnnnnnnnnnnnnnnnnnnnnnnnnnnnnnnnnnnnnnnnnnnnnnnnnnnnnnnnnnnnnnnnnnnnnnnnnnnnnnnnnnnnnnnnnnnnnnnnnnnnnnnnnnnnnnnnnnnnnnnnnnnnnnnnnnnnnnnnnnnnnnnnnnnnnnnnnnncagacatatcaaatttgacaggtattgtataccctttggatctttaggaattaatttttgcctctgtcactcagctttgtatattttgaaatggagataagtatagggaggtcttggaaggaaaattgccagaattcccaaaccatgtaacactcattgagaattccagatccattatatctaaagggcaagtgaaggaaacagtattgtgaactgggtataactccttggttcttaactagtacattcttaatctgtgagacccaaaggttgataaacaataatttaagattgtacagtactctaaacgtctgcaaaggtctagatgttatcagtatcactagtttttatttctgccagtagctcccttttaggttacattgttgtcctctttccagtgtggcatctgtcattggtttttcactatggcaagttcattaaaaagcttgctccattgttatcttcaagtaatgcccataaggagatggaagatatctgagacaattaaggctttagcttctaggcaagagaaataacgttgcattaaatttcaagtttctttctgctagacttgaatgtgtctagccactctaatttatgggggcttttggttttttcctattgtactttgtatgtagaattgttttgaaatatcaagcatatttactttgaatttgaactctttcttaattttgtatttatcctttgaataaaatgtaaatccaatatttattatt

SEQ ID NO: 86 - protein, 13 aa, Homo sapien
HCAFSLSDRVRPS

SEQ ID NO: 87 - DNA, 980 bp, Homo sapien
ggggcagacgtgggacgggaaggacggctgccgggactggcgcgcggggacactgggccgacgcgtggagtagcggggagagcgggaagcctgagggggcggggccggcgcgaggccgtgggtgcggcacgaggatgccggcggcgggacagcgcccgtaggcagccccacgggcagggcgcgcgggcggggcggggcgggccgggccagaggagctcccggcatgtcgcaagggctcccggccgccggcagcgtcctgcagaggagcgtcgcggcgcccgggaaccagccgcagccgcagccgcagcagcagagccctgaggatgatgacaggaaggtccgaaggagagaaaaaaaccgagttgctgctcagagaagtcggaagaagcagacccagaaggctgacaagctccatgaggaatatgagagcctggagcaagaaaacaccatgctgcggagagagatcgggaagctgacagaggagctgaagcacctgacagaggcactgaaggagcacgagaagatgtgcccgctgctgctctgccctatgaactttgtgccagtgcctccccggccggaccctgtggccggctgcttgccccgatgaagccggggacactcctctgcccagcaaggagccttggtcattttcatacctgggaggaaggcttttccttcacaattgtatacagggggcacctgtggccaggcctcctcctgggagctccaggaccagccagctgtgttccctgcagactgggctcagcccgacatccaacaggcgccaaactcacagagcccttgtgcagatccagcatggaggccaccctcaggagtgacttctcatccaccctggcagctagtaggttctgctgttatgcagagccatttcctctagaatttggataataaagatgcttattgtctctcccttctccagttctgggaatttacaggcacaatacacttccttttcctgg

SEQ ID NO: 88 - protein, 127 aa, Homo sapien
MSQGLPAAGSVLQRSVAAPGNQPQPQPQQQSPEDDDRKVRRREKNRVAAQRSRKKQTQKADKLHEEYESLEQENTMLRREIGKLTEELKHLTEALKEHEKMCPLLLCPMNFVPVPPRPDPVAGCLPR

SEQ ID NO: 89 - DNA, 1709 bp, Homo sapien
gggcggggtgccgcatccccagcccgccgccatggccgcctacaaactggtgctgatccggcacggcgagagcgcatggaacctggagaaccgcttcagcggctggtacgacgccgacctgagcccggcgggccacgaggaggcgaagcgcggcgggcaggcgctacgagatgctggctatgagtttgacatctgcttcacctcagtgcagaagagagcgatccggaccctctggacagtgctagatgccattgatcagatgtggctgccagtggtgaggacttggcgcctcaatgagcggcactatgggggtctaaccggtctcaataaagcagaaactgctgcaaagcatggtgaggcccaggtgaagatctggaggcgctcctatgatgtcccaccacctccgatggagcccgaccatcctttctacagcaacatcagtaaggatcgcaggtatgcagacctcacagaagatcagctaccctcctgtgagagtctgaaggatactattgccagagctctgcccttctggaatgaagaaatagttccccagatcaaggaggggaaacgtgtactgattgcagcccatggcaacagcctccggggcattgtcaagcatctggagggtctctctgaagaggctatcatggagctgaacctgccgactggtattcccattgtctatgaattggacaagaacttgaagcctatcaagcccatgcagtttctgggggatgaagagacggtgcgcaaagccatggaagctgtggctgcccagggcaaggccaagaagtgaaggccggcggggaggatactgtccccaggagcaccctccctgcccgtcttgtccctctgcccctcccacctgcacatgtcacactgaccacatctgtagacatcttgagttgtagctgcagacggggaccagtggctcccattttcattttagccattttgtcgcctgcacccactcccttcatacaatctagtcagaatagcagttctagagcacaggttctcagtctaagctatggaaaagctccccttatccaacagagtttaaaagtagtgacttgggtttttgcgagtgctttgtttactaaggactttggggaggaaccatgctaagccatgaccagtgaggagaagcaacagagcctgtctgtccccatgagcggagtctgtcctctgctcttctgcagtcaggtcactgcctactgcctgggggctctagtcattccagtggaagacgaatgtaacctgcgtggtgatgtgacaactgtttcctccctgaccccagaggatctggctctaggttgggatcaatcctgaatttcgttatgtgttaatttacttttattaaaaaagtatagtatatataatacaaaacaataacccttctggggtttcttgtggcggttgaaatagtcccacatgtggtcatcagaaatagcattcctcataccaatataggatcagctccttgacctctgaggggtcaggagtgcttcctggtgtgtgtattagaatcccttcctgccttgtttcatggcagtgaaatgcctcttggtcctgtccagtgtatctttcactgatttctgaatcatgttctagttgcttgaccctgccacatgggtccagtgttcatctgagcataactgtactaaatcctttttccatatcagtataataaaggagtgatgtgcaat

SEQ ID NO: 90 - protein, 254 aa, Homo sapien
MAAYKLVLIRHGESAWNLENRFSGWYDADLSPAGHEEAKRGGQALRDAGYEFDICFTSVQKRAIRTLWTVLDAIDQMWLPVVRTWRLNERHYGGLTGLNKAETAAKHGEAQVKIWRRSYDVPPPPMEPDHPFYSNISKDRRYADLTEDQLPSCESLKDTIARALPFWNEEIVPQIKEGKRVLIAAHGNSLRGIVKHLEGLSEEAIMELNLPTGIPIVYELDKNLKPIKPMQFLGDEETVRKAMEAVAAQGKAKK

SEQ ID NO: 91 - DNA, 2824 bp, Homo sapien
gcggccgctttcgatttcgctttcccctaaatggctgagcttctcgccagcgcaggatcagcctgttcctgggactttccgagagccccgccctcgttccctcccccagccgccagtaggggaggactcggcggtacccggagcttcaggccccaccggggcgcggagagtcccagacccggccgggaccgggacggcgtccgagtgccaatggctagctctaggtgtcccgctccccgcgggtgccgctgcctccccggagcttctctcgcatggctggggacagtactgctacttctcgccgactgggtgctgctccggaccgcgctgccccgcatattctccctgctggtgcccaccgcgctgccactgctccgggtctgggcggtgggcctgagccgctgggccgtgctctggctgggggcctgcggggtcctcagggcaacggttggctccaagagcgaaaacgcaggtgcccagggctggctggctgctttgaagccattagctgcggcactgggcttggccctgccgggacttgccttgttccgagagctgatctcatggggagcccccgggtccgcggatagcaccaggctactgcactggggaagtcaccctaccgccttcgttgtcagttatgcagcggcactgcccgcagcagccctgtggcacaaactcgggagcctctgggtgcccggcggtcagggcggctctggaaaccctgtgcgtcggcttctaggctgcctgggctcggagacgcgccgcctctcgctgttcctggtcctggtggtcctctcctctcttggggagatggccattccattctttacgggccgcctcactgactggattctacaagatggctcagccgataccttcactcgaaacttaactctcatgtccattctcaccatagccagtgcagtgctggagttcgtgggtgacgggatctataacaacaccatgggccacgtgcacagccacttgcagggagaggtgtttggggctgtcctgcgccaggagacggagtttttccaacagaaccagacaggtaacatcatgtctcgggtaacagaggacacgtccaccctgagtgattctctgagtgagaatctgagcttatttctgtggtacctggtgcgaggcctatgtctcttggggatcatgctctggggatcagtgtccctcaccatggtcaccctgatcaccctgcctctgcttttccttctgcccaagaaggtgggaaaatggtaccagttgctggaagtgcaggtgcgggaatctctggcaaagtccagccaggtggccattgaggctctgtcggccatgcctacagttcgaagctttgccaacgaggagggcgaagcccagaagtttagggaaaagctgcaagaaataaagacactcaaccagaaggaggctgtggcctatgcagtcaactcctggaccactagtatttcaggtatgctgctgaaagtgggaatcctctacattggtgggcagctggtgaccagtggggctgtaagcagtgggaaccttgtcacatttgttctctaccagatgcagttcacccaggctgtggaggtactgctctccatctaccccagagtacagaaggctgtgggctcctcagagaaaatatttgagtacctggaccgcacccctcgctgcccacccagtggtctgttgactcccttacacttggagggccttgtccagttccaagatgtctcctttgcctacccaaaccgcccagatgtcttagtgctacaggggctgacattcaccctacgccctggcgaggtgacggcgctggtgggacccaatgggtctgggaagagcacagtggctgccctgctgcagaatctgtaccagcccaccgggggacagctgctgttggatgggaagccccttccccaatatgagcaccgctacctgcacaggcaggtggctgcagtgggacaagagccacaggtatttggaagaagtcttcaagaaaatattgcctatggcctgacccagaagccaactatggaggaaatcacagctgctgcagtaaagtctggggcccatagtttcatctctggactccctcagggctatgacacagaggtagacgaggctgggagccagctgtcagggggtcagcgacaggcagtggcgttggcccgagcattgatccggaaaccgtgtgtacttatcctggatgatgccaccagtgccctggatgcaaacagccagttacaggtggagcagctcctgtacgaaagccctgagcggtactcccgctcagtgcttctcatcacccagcacctcagcctggtggagcaggctgaccacatcctctttctggaaggaggcgctatccgggaggggggaacccaccagcagctcatggagaaaaaggggtgctactgggccatggtgcaggctcctgcagatgctccagaatgaaagccttctcagacctgcgcactccatctccctcccttttcttctctctgtggtggagaaccacagctgcagagtagcagctgcctccaggatgagttacttgaaatttgccttgagtgtgttacctcctttccaagctcctcgtgataatgcagacttcctggagtacaaacacaggatttgtaattcctactgtaacggagtttagagccagggctgatgctttggtgtggccagcactctgaaactgagaaatgttcagaatgtacggaaagatgatcagctattttcaacataactgaaggcatatgctggcccataaacaccctgtaggttcttgatatttataataaaattggtgttttgt

SEQ ID NO: 92 - protein, 808 aa, Homo sapien
MAELLASAGSACSWDFPRAPPSFPPPAASRGGLGGTRSFRPHRGAESPRPGRDRDGVRVPMASSRCPAPRGCRCLPGASLAWLGTVLLLLADWVLLRTALPRIFSLLVPTALPLLRVWAVGLSRWAVLWLGACGVLRATVGSKSENAGAQGWLAALKPLAAALGLALPGLALFRELISWGAPGSADSTRLLHWGSHPTAFVVSYAAALPAAALWHKLGSLWVPGGQGGSGNPVRRLLGCLGSETRRLSLFLVLVVLSSLGEMAIPFFTGRLTDWILQDGSADTFTRNLTLMSILTIASAVLEFVGDGIYNNTMGHVHSHLQGEVFGAVLRQETEFFQQNQTGNIMSRVTEDTSTLSDSLSENLSLFLWYLVRGLCLLGIMLWGSVSLTMVTLITLPLLFLLPKKVGKWYQLLEVQVRESLAKSSQVAIEALSAMPTVRSFANEEGEAQKFREKLQEIKTLNQKEAVAYAVNSWTTSISGMLLKVGILYIGGQLVTSGAVSSGNLVTFVLYQMQFTQAVEVLLSIYPRVQKAVGSSEKIFEYLDRTPRCPPSGLLTPLHLEGLVQFQDVSFAYPNRPDVLVLQGLTFTLRPGEVTALVGPNGSGKSTVAALLQNLYQPTGGQLLLDGKPLPQYEHRYLHRQVAAVGQEPQVFGRSLQENIAYGLTQKPTMEEITAAAVKSGAHSFISGLPQGYDTEVDEAGSQLSGGQRQAVALARALIRKPCVLILDDATSALDANSQLQVEQLLYESPERYSRSVLLITQHLSLVEQADHILFLEGGAIREGGTHQQLMEKKGCYWAMVQAPADAPE

SEQ ID NO: 93 - DNA, 1719 bp, Homo sapien
gggatcccggggccgccgcgtcgctcgggccccgccatggccgtcaccatcacgctcaaaacgctgcagcagcagaccttcaagatccgcatggagcctgacgagacggtgaaggtgctaaaggagaagatagaagctgagaagggtcgtgatgccttccccgtggctggacagaaactcatctatgccggcaagatcttgagtgacgatgtccctatcagggactatcgcatcgatgagaagaactttgtggtcgtcatggtgaccaagaccaaagccggccagggtacctcagcacccccagaggcctcacccacagctgccccagagtcctctacatccttcccgcctgcccccacctcaggcatgtcccatcccccacctgccgccagagaggacaagagcccatcagaggaatccgcccccacgacgtccccagagtctgtgtcaggctctgttccctcttcaggtagcagcgggcgagaggaagacgcggcctccacgctagtgacgggctctgagtatgagacgatgctgacggagatcatgtccatgggctatgagcgagagcgggtcgtggccgccctgagagccagctacaacaacccccaccgagccgtggagtatctgctcacgggaattcctgggagccccgagccggaacacggttctgtccaggagagccaggtatcggagcagccggccacggaagcagcaggagagaaccccctggagttcctgcgggaccagccccagttccagaacatgcggcaggtgattcagcagaaccctgcgctgctgcccgccctgctccagcagctgggccaggagaaccctcagcttttacagcaaatcagccggcaccaggagcagttcatccagatgctgaacgagccccctggggagctggcggacatctcagatgtggagggggaggtgggcgccataggagaggaggccccgcagatgaactacatccaggtgacgccgcaggagaaagaagctatagagaggttgaaggccctgggcttcccagagagcctggtcatccaggcctatttcgcgtgtgaaaaaaatgagaacttggctgccaacttcctcctgagtcagaactttgatgacgagtgatgccaggaagccaggccaccgaagcccccaccctacccttattccatgaaagttttataaaagaaaaaatatatatatattcatgtttatttaagaaatggaaaaaaaaatcaaaaatcttaaaaaaacaagcaaacagtccagcttcctgtcctcctaaagtggcccctgttcccatctcccgggccagacagctgtccccccgtcctcctccccagcccagcctgctcagagaagctggcaggactgggaggcgacagatgggcccctcttggcctctgtcccagctctctgcagccagacggaaaggcggctgcttgcctctccatcctccgaaaaacccctgaggacccccccccatcctcttctaggatgaggggaagctggagccccaactttgatcctccattggagtggcccaaatctttccatctagggcaagtcctgaaaggcccaaggccccctcccagtctggccttggcctccagcctggagaagggctaacatcagctcattgtcaaggccacccccaccccagaacagaaccgtgtctctgataaaggttttgaagtgaataaagttttaaaaact

SEQ ID NO: 94 - protein, 363 aa, Homo sapien
MAVTITLKTLQQQTFKIRMEPDETVKVLKEKIEAEKGRDAFPVAGQKLIYAGKILSDDVPIRDYRIDEKNFVVVMVTKTKAGQGTSAPPEASPTAAPESSTSFPPAPTSGMSHPPPAAREDKSPSEESAPTTSPESVSGSVPSSGSSGREEDAASTLVTGSEYETMLTEIMSMGYERERVVAALRASYNNPHRAVEYLLTGIPGSPEPEHGSVQESQVSEQPATEAAGENPLEFLRDQPQFQNMRQVIQQNPALLPALLQQLGQENPQLLQQISRHQEQFIQMLNEPPGELADISDVEGEVGAIGEEAPQMNYIQVTPQEKEAIERLKALGFPESLVIQAYFACEKNENLAANFLLSQNFDDE

SEQ ID NO: 95 - DNA, 2742 bp, Homo sapien
gtcactcgtataaaaacctatgctttgaaggttctcgtgtgtctcggcctgcaggtctcgctcagagctgtgtccctgaacatccaccctgctggggtggcttgacgcacttctgtgcaaatctgttcgctcgcaaccctacctacctctctcccgaaccggagaaaaccttcggcggggtccttccgggttttgtgtcgaatctgcggcggcgacccggcgccgcgtcacgcggtggtgaatgtgcggcagtacgcgcgccgcgtcgtttacgcggcgatttcatcatgctccgagccggcggcgcgcgccgcttccgtcgccaccctctctggacagcccagggccgcaggctcatgccctctccgcgtccagtgctgcttagaggtgctcgcgccgctctgctgctgctgctgccgccccggctcttagcccgaccctcgctcctcctccgccggtccctcagcgcggcctcctgcgccccgatctccttgcccgccgccgcctcccggagcagcatggacggcgcgggggctgaggaggtgctggcacctctgaggctagcagtgcgccagcagggagatcttgtgcgaaaactcaaagaagataaagcaccccaagtagacgtagacaaagcagtggctgagctcaaagcccgcaagagggttctggaagcaaaggagctggcgttacagcccaaagatgatattgtagaccgagcaaaaatggaagataccctgaagaggaggtttttctatgatcaagcttttgctatttatggaggtgttagtggtctgtatgactttgggccagttggctgtgctttgaagaacaatattattcagacctggaggcagcactttatccaagaggaacagatcctggagatcgattgcaccatgctcacccctgagccagttttaaagacctctggccatgtagacaaatttgctgacttcatggtgaaagacgtaaaaaatggagaatgttttcgtgctgaccatctattaaaagctcatttacagaaattgatgtctgataagaagtgttctgtcgaaaagaaatcagaaatggaaagtgttttggcccagcttgataactatggacagcaagaacttgcggatctttttgtgaactataatgtaaaatctcccattactggaaatgatctatcccctccagtgtcttttaacttaatgttcaagactttcattgggcctggaggaaacatgcctgggtacttgagaccagaaactgcacaggggattttcttgaatttcaaacgacttttggagttcaaccaaggaaagttgccttttgctgctgcccagattggaaattcttttagaaatgagatctcccctcgatctggactgatcagagtcagagaattcacaatggcagaaattgagcactttgtagatcccagtgagaaagaccaccccaagttccagaatgtggcagaccttcacctttatttgtattcagcaaaagcccaggtcagcggacagtccgctcggaaaatgcgcctgggagatgctgttgaacagggtgtgattaataacacagtattaggctatttcattggccgcatctacctctacctcacgaaggttggaatatctccagataaactccgcttccggcagcacatggagaatgagatggcccattatgcctgtgactgttgggatgcagaatccaaaacatcctacggttggattgagattgttggatgtgctgatcgttcctgttatgacctctcctgtcatgcacgagccaccaaagtcccacttgtagctgagaaacctctgaaagaacccaaaacagtcaatgttgttcagtttgaacccagtaagggagcaattggtaaggcatataagaaggatgcaaaactggtgatggagtatcttgccatttgtgatgagtgctacattacagaaatggagatgctgctgaatgagaaaggggaattcacaattgaaactgaagggaaaacatttcagttaacaaaagacatgatcaatgtgaagagattccagaaaacactatatgtggaagaagttgttccgaatgtaattgaaccttccttcggcctgggtaggatcatgtatacggtatttgaacatacattccatgtacgagaaggagatgaacagagaacattcttcagtttccctgctgtagttgctccattcaaatgttccgtcctcccactgagccaaaaccaggagttcatgccatttgtcaaggaattatcggaagccctgaccaggcatggagtatctcacaaagtagacgattcctctgggtcaatcggaaggcgctatgccaggactgatgagattggcgtggcttttggtgtcaccattgactttgacacagtgaacaagaccccccacactgcaactctgagggaccgtgactcaatgcggcagataagagcagagatctctgagctgcccagcatagtccaagacctagccaatggcaacatcacatgggctgatgtggaggccaggtatcctctgtttgaagggcaagagactggtaaaaaagagacaatcgaggaatgaggacaattttgacaacttttgaccacttgcgctaataaaaaaaaaaaaactactcttatgtccactttacaaaagaaaacagcattgtgattactcccagggaccgtattttatcttcagtggctgcctgattttacccccacaattaaagttgaaggaatcctga

SEQ ID NO: 96 - protein, 685 aa, Homo sapien
MDGAGAEEVLAPLRLAVRQQGDLVRKLKEDKAPQVDVDKAVAELKARKRVLEAKELALQPKDDIVDRAKMEDTLKRRFFYDQAFAIYGGVSGLYDFGPVGCALKNNIIQTWRQHFIQEEQILEIDCTMLTPEPVLKTSGHVDKFADFMVKDVKNGECFRADHLLKAHLQKLMSDKKCSVEKKSEMESVLAQLDNYGQQELADLFVNYNVKSPITGNDLSPPVSFNLMFKTFIGPGGNMPGYLRPETAQGIFLNFKRLLEFNQGKLPFAAAQIGNSFRNEISPRSGLIRVREFTMAEIEHFVDPSEKDHPKFQNVADLHLYLYSAKAQVSGQSARKMRLGDAVEQGVINNTVLGYFIGRIYLYLTKVGISPDKLRFRQHMENEMAHYACDCWDAESKTSYGWIEIVGCADRSCYDLSCHARATKVPLVAEKPLKEPKTVNVVQFEPSKGAIGKAYKKDAKLVMEYLAICDECYITEMEMLLNEKGEFTIETEGKTFQLTKDMINVKRFQKTLYVEEVVPNVIEPSFGLGRIMYTVFEHTFHVREGDEQRTFFSFPAVVAPFKCSVLPLSQNQEFMPFVKELSEALTRHGVSHKVDDSSGSIGRRYARTDEIGVAFGVTIDFDTVNKTPHTATLRDRDSMRQIRAEISELPSIVQDLANGNITWADVEARYPLFEGQETGKKETIEE

SEQ ID NO: 97 - DNA, 693 bp, Homo sapien
tccccgcccttctcttttctacagtatctgttacctcagtcagattgaggatgcacatatactgggaaaataatcgacttccagcgtccctcatgtagtctctacctgattcaggaatctctaacccagtatcggaacgttaagcggcttctccgctttcctgccgtgagaaactcgaggtgaccaacctccgtttccggttggctccggttgcagagttgagtgtcctgagaggtcagattgctgtcagacatggcccatgaacatggacatgagcatggacatcataaaatggaacttccagattatagacaatggaagatagaagggacaccattagaaactatccagaagaagctggctgcaaaagggctaagggatccatggggccgcaatgaagcttggagatacatgggtggctttgcaaagagtgtttccttttctgatgtattctttaaaggattcaaatggggatttgctgcatttgtggtagctgtaggagctgaatattacctggagtccctgaataaagataagaagcatcactgaagataatacctggaagcatcatagtggtttcttaactctccaaaataagatttcttctctgtagcctacttgtctggtttatcccttacagaatattagtaaagatttaatcaattaaaatatatataaaaaaaaaaaaaaaaa

SEQ ID NO: 98 - protein, 98 aa, Homo sapien
MAHEHGHEHGHHKMELPDYRQWKIEGTPLETIQKKLAAKGLRDPWGRNEAWRYMGGFAKSVSFSDVFFKGFKWGFAAFVVAVGAEYYLESLNKDKKHH

SEQ ID NO: 99 - DNA, 1282 bp, Homo sapien
gctgcgccccacgccagcccgcgccccgcatggctgccgccggggccaggcctgtggagctgggcttcgccgagtcggcgccggcgtggcgactgcgcagcgagcagttccccagcaaggtgggcgggcggccggcatggctgggcgcggccgggctgccggggccccaggccctggcctgcgagctgtgcggccgcccgctctccttcctgctgcaggtgtatgcgccgctgcctggccgcccggacgccttccaccgctgcatcttcctcttctgctgccgcgagcagccgtgctgtgccggcttgcgagtttttaggaatcaactacccaggaaaaacgatttttactcatatgagccaccttctgagaatcctcccccagaaacaggagaatcagtgtgtctccagcttaagtctggtgctcatctctgcagggtttgtggctgtttaggccccaaaacgtgctccagatgccacaaagcatattactgcagcaaggagcatcagaccctagactggagattgggacataagcaggcttgtgcacaaccagatcatctggaccatataattccagaccacaacttcctttttccagaatttgaaattgtaatagaaacagaagatgagattatgcctgaggttgtggaaaaggaagattactcagagattatagggagcatgggtgaagcacttgaggaaggactggattccatggcaaaacatgaatccagggaagataaaatttttcagaagtttaaaactcagatagcccttgaaccagaacagattcttagatatggcagaggtattgcccccatctggatttctggtgaaaatattcctcaagaaaaggatattccagattgcccctgtggtgccaagagaatattggaattccaggtcatgcctcagctcttaaactacctgaaggctgacagactgggcaagagcattgactggggcatcctggctgctttcacctgtgctgagagctgcagcttgggtactggttatacagaagaatttgtgtggaagcaggatgtaacagatacaccgtaaaggcatcttaaagccttgaaaaatgttaataatcttttataccttgcaattccatttctgggattttatcctaaggaaatacttataccaaaaatagaggtgcagagatgttgacggattgcttacacagtgtctacttattagtgaaacaaaagtgtccagtgacagggaattaaataaattttggtacatccacaaaaaaaaaaaaaaaaaaaaaa

SEQ ID NO: 100 - protein, 344 aa, Homo sapien
MAAAGARPVELGFAESAPAWRLRSEQFPSKVGGRPAWLGAAGLPGPQALACELCGRPLSFLLQVYAPLPGRPDAFHRCIFLFCCREQPCCAGLRVFRNQLPRKNDFYSYEPPSENPPPETGESVCLQLKSGAHLCRVCGCLGPKTCSRCHKAYYCSKEHQTLDWRLGHKQACAQPDHLDHIIPDHNFLFPEFEIVIETEDEIMPEVVEKEDYSEIIGSMGEALEEGLDSMAKHESREDKIFQKFKTQIALEPEQILRYGRGIAPIWISGENIPQEKDIPDCPCGAKRILEFQVMPQLLNYLKADRLGKSIDWGILAAFTCAESCSLGTGYTEEFVWKQDVTDTP

SEQ ID NO: 101 - DNA, 2078 bp, Homo sapien
tgggcaattaaccaagccatagccaatgaatatgaagtccggagaaagctgctaataaaacgtttggatgtcactgtacaatcctttggctggtctgacagagctaagagccagacagaaaaattagccaaggtttaccagccgaaacgttcagtcttatcccctaaaactactatttctgttgcccatcttttggctgcaaggcaggacttgtcaaagattttaaggacaagcagcggctctataagagaaaagactgcctgtgccatcaataaggtgttgatgggcagggtgcctgacagaggtggtagacccaatgaaatcgaacctccacccccagagatgccaccgtggcagaagaggcaagatggcccccagcagcaaacaggaggccgagtaggagggagaggtggctatgaacattcctcatacggaggacgaggaggtcatgaacaaggaggcgggagaggtggacgtggtggctatgaccatggtggccgagggggaggaagaggaaataagcatcaaggaggctggacagatggagggagtggtggaggaggtggctaccaagatggtggttatcgagattcaggtttccagccaggtggctatcatggtggccacagcagtggtggctatcaaggcggaggttatggtggcttccaaacatcttcttcatatacaggaagtggataccagggtggtggctaccagcaggacaatagataccaagatggcgggcaccatggtgatcgtggtggtggtcgtggtgggcgaggtggtcgtggaggccgaggtggtcgtgcaggccagggaggaggctggggaggaagagggagccagaattatcaccaagggggtcaatttgaacagcatttccagcatggaggttatcagtataatcattctggatttggacagggaagacattacactagttgaggctaccgaactttacattttgctagagctcaagtaatagaaacttagtttcagaatcctgaattcagcacctattttgaattaatgtgagaccacaggtggcaggcagattcctgcttggcataagcatttgtaggtcttcattcaattctgttagatttttttattggacttacataatgccgtttatttgagaaacacataacatctctccttcctatgaaaaattttttaaaaggtggttaaaattgcctttaattgcccagtagactaattccacagtcagaacatgcaaacttttttgaagaaattacttgaataagtagttttcatgttttcaatatgcagttttgaaaatgaggattcacctagacttttttagatttactactaggaaaccttcctcatatgaataaccatttatatgtgttttgcttaaagtattccaatgcctattttccaagcacagttctgccccccggttgacttttatgccacgtgtgcttcatgatggaacttttaggtcagttcctattaaatgagctcttctgcagatagcacattcagtagccttattttgttgatggaatactgtatcatatgctcaactctgaaaaccttgaacacggccaaaatccataaagattataaaagcaaactaagttgtgaagctatagtacatgtaggcatttagttaagtatagcaattcaaactgacctgcatccatccaaaacaaattcctccttcaaccttatttttacttgaaatttgctagaagaaatagcaaaccgaaatttgttttatgcatgagttaataccactggctcagcaaatacaagttagtttgctttaagcaggtaactttttttgtaatggaagaaatgcactacaaagttaagacagatttttgctaagtgcaggaggccctttattattgctgcagaaaacaaaagcctggctgagttgatgttttacattctcccttactgaaatctacatgacatgatgcttcttgctgggtttttgtacatgtaaacattgtcaagctgtgaaagaaaatggctggaggtgtgctttgtgtgaaaggtgagcaataaagtatctgttaagttcaaaaaaaaaaaaaaaaaaa

SEQ ID NO: 102 - protein, 314 aa, Homo sapien
WAINQAIANEYEVRRKLLIKRLDVTVQSFGWSDRAKSQTEKLAKVYQPKRSVLSPKTTISVAHLLAARQDLSKILRTSSGSIREKTACAINKVLMGRVPDRGGRPNEIEPPPPEMPPWQKRQDGPQQQTGGRVGGRGGYEHSSYGGRGGHEQGGGRGGRGGYDHGGRGGGRGNKHQGGWTDGGSGGGGGYQDGGYRDSGFQPGGYHGGHSSGGYQGGGYGGFQTSSSYTGSGYQGGGYQQDNRYQDGGHHGDRGGGRGGRGGRGGRGGRAGQGGGWGGRGSQNYHQGGQFEQHFQHGGYQYNHSGFGQGRHYTS

SEQ ID NO: 103 - DNA, 1861 bp, Homo sapien
ggggggggagatgcagtagccgaaaactgcgcggaggcacgagaggccggggagagcgttctgggtccgagggtccaggtaggggttgagccaccatctgaccgcaagctgcgtcgtgtcgccttctctgcaggcaccatgagccaggacaccgaggtggatatgaaggaggtggagctgaatgagttagagcccgagaagcagccgatgaacgcggcgtctggggcggccatgtccctggcggaagccgagaagaatggtctggtgaagatcaaggtggcggaagacgaggcggaggcggcagccgcggctaagttcacgggcctgtccaaggaggagctgctgaaggtggcaggcagccccggctgggtacgcacccgctgggcactgctgctgctcttctggctcggctggctcggcatgcttgctggtgccgtggtgataatcgtgcgagcgccgcgttgtcgcgagctaccggcgcagaagtggtggcacacgggccccctctaccgcatcggcgaccttcaggccttccagggccacggcgcgggcaacctggcgggtctgaaggggcgtctcgattacctgagctctctgaaggtgaagggccttgtgctgggtccaattcacaagaaccagaaggatgatgtcgctcagactgacttgctgcagatcgaccccaattttggctccaaggaagattttgacagtctcttgcaatcggctaaaaaaaagagcatccgtgtcattctggaccttactcccaactaccggggtgacaactcgtggttctccactcaggttgacactgtggccaccaaggtgaaggatgctctggagttttggctgcaagctggcgtggatgggttccaggttcgggacatagagaatctgaaggatgcatcctcattcttggctgagtggcaaaatatcaccaagggcttcagtggagacaggctcttgattgcggggactaactcctccgaccttcagcagatcctgagcctactcgaatccaacaaagacttgctgttgactagctcatacctgtctgattctggttctactccccagcatacaaaatccctagtcacacagtatttgaatgccactggcaatcgctggtgcagctggagtttgtctcaggcaaggctcctgacttccttcttgccggctcaacttctccgactctaccagctgatgctcttcaccctgccagggacccctcttttcagctacggggatgagattggcctggatgcagctgcccttcctccacagcctatggaggctccagtcatgctgtgggatgagtccagcttccctgacatcccaggggctgtaagtgccaacatgactgtgaagggccagagtgaagaccctggctccctcctttccttgttccggcggctgagtgaccagcggagtaaggagcgctccctactgcatggggacttccacgcgttctccgctgggcctggactcttctcctatatccgccactgggaccagaatgagcgttttctggtagtgcttaactttggggatgtgggcctctcggctggactgcaggcctccgacctgcctgccagcgccagcctgccagccaaggctgacctcctgctcagcacccagccaggccgtgaggagggctcccctcctgagctgggacgcctgaaactggagcctcacgaagggctgctgctccgcttcccctacgcggcctgacctcagcctgacatggacccactacccttctcctttccttcccaggccctttggcttctgattttttttctcttttttaaaacaaacaaacaaactgttgcagattatgagtgaaccccaaatagggtgtttt

SEQ ID NO: 104 - protein, 529 aa, Homo sapien
MSQDTEVDMKEVELNELEPEKQPMNAASGAAMSLAEAEKNGLVKIKVAEDEAEAAAAAKFTGLSKEELLKVAGSPGWVRTRWALLLLFWLGWLGMLAGAVVIIVRAPRCRELPAQKWWHTGPLYRIGDLQAFQGHGAGNLAGLKGRLDYLSSLKVKGLVLGPIHKNQKDDVAQTDLLQIDPNFGSKEDFDSLLQSAKKKSIRVILDLTPNYRGDNSWFSTQVDTVATKVKDALEFWLQAGVDGFQVRDIENLKDASSFLAEWQNITKGFSGDRLLIAGTNSSDLQQILSLLESNKDLLLTSSYLSDSGSTPQHTKSLVTQYLNATGNRWCSWSLSQARLLTSFLPAQLLRLYQLMLFTLPGTPLFSYGDEIGLDAAALPPQPMEAPVMLWDESSFPDIPGAVSANMTVKGQSEDPGSLLSLFRRLSDQRSKERSLLHGDFHAFSAGPGLFSYIRHWDQNERFLVVLNFGDVGLSAGLQASDLPASASLPAKADLLLSTQPGREEGSPPELGRLKLEPHEGLLLRFPYAA

SEQ ID NO: 105 - DNA, 4289 bp, Homo sapien
gatcaatactgaggccgcgtcgacccccttgagccgagacccccccccagcccagcccccaccccaccccccgcacacgccccaccccccccacgacccagcctcataccgcaccagctgaggcacccaagaggattaccccctggggccctctcccgccccccaaaaaagagaagatcccctctcctggcccatcccttcccttcttccctcccccctccccccgaactttccctctcgcatgcttttcccctgcaccacggatcgcctctcggatgccgcttgcctggaagctgcgttaggagcgagcggcggcggtggcggcggtggcggcggcggcggcagctcgggagtgctatgaccggcaaactcgccgagaagctgccggtgaccatgagcagtttgctaaaccaactgcctgacaatctgtaccccgaggagatccccagcgcgctcaacctcttctccggcagcagcgactcggtagtccattacaatcagatggctacagagaatgtaatggacatcggtctgaccaacgagaagcccaacccggaactctcttactccggctccttccagccagcccccgggaacaagaccgtgacctacttgggaaagttcgccttcgactccccttccaactggtgccaggacaacatcattagcctcatgagcgccggcatcttgggggtgcccccggcttcaggggcgctaagcacgcagacgtccacggccagcatggtgcagccaccgcagggtgacgtggaggccatgtatcccgcgctacccccctactccaactgcggcgacctctactcagagcccgtgtctttccacgacccccagggcaatcccgggctcgcctattccccccaggattaccaatcggccaagccggcgttggacagcaatctcttccccatgattcctgactacaacctctaccaccaccccaacgacatgggctccattccggagcacaagcccttccagggcatggaccccatccgggtcaacccgccccctactacccctctggagaccatcaaggcattcaaagacaagcagatccacccgggctttggcagcctgccccagccgccgctcaccctcaagcccatccggccccgcaagtaccccaaccggcctagcaagacaccgctccacgaacggccccacgcgtgcccggccgagggctgcgaccgccgtttcagccgttcggacgagctgacccggcacctgcgcatccacacgggccacaagcccttccagtgccggatctgcatgcggagcttcagccgcagcgaccacctcaccactcacatccgcactcatacgggcgagaagccctttgcctgcgagttctgcgggcgcaagtttgcgcgcagcgacgagcgcaagcgccacgccaagatccacctcaagcaaaaggagaagaaggcggagaagggcggtgcaccctctgcatcctcggcgccccccgtgtcgctggcccccgtggtcaccacctgcgcctgaggatcgggcccccagatccccacttttcccctccagtgcctcccggctgctagcctgaaagcagcgggaaagccagccacggaggcgtaggggccgcgccctggcctctccatggacgtgcggccccttgcttccccttcgatgcccccggttcccaacctttcacgccggccagcggtcaggggccagggctggaggcgccttcccctcgcggtcccccacttagccaaggcgtgggggcggaaaggtggcgtctagcccgctttgttcagttcggatcgccttgatccaggggccgccgggccgcgccaaggacctgcaagggactgaaggcggagcccatccaaccctcgcccgacccaaacacctcattgtttcccccacgtctccctctataccccctcgaagactcgagagggggagggggtaaggagcgcaccaaagcgcagagcttgctgcccgccgcacgcacgcgcgcctgcgtgcggggatgcgcgcgagtgtgtgcgtgctcgcgtgtgtgtgtatgtgtgtgtgtgagtgtgtgtgtgtgcgcgcgcgcaagcgtgtgtgtttaagactcttgagctgaactgggctgtgtttaccccaaactcttccccacctcgggtccccaagccgctgggagatgtcccatgctgggggtccgcacgtggctggaggaggtggtcttccatccgctctgaaatcatgtttcttagagaaatgcctcggatgccgccgacgcggtgctgctgccgccgcttcgggtttggcccctcagaacccctccttttctgagcgcttccctcttaggcctcagggcagtttgatctgtggggagaaagagcagccatcgctgagcctgccttttaaaatatatgtgtatttccttagccccactctaagaaatctatgttcctgagtttgccccctgccctcccactccttccccttttcccctctaaaccttctcccatctctttcaaaatcttttcccagaaaggcaggcttcaaccagccactccagctttgtgtcttctctcaattacatagcaatttctccttcccaccatcatggggaagctggctctgcttttgccctttgtcatcaccaacacaacagatagaatttaaatataagtatatggtgtgcgtgtgtatgtatgtgtatgtatatgcatgcatgtgtataaagatgcacatgcgtacatatacataacatacacacaatatgtattcctagcaaaataaaatctctaaggtacttggttatccagtgcagtgcaccggaataaagagaatttgtaggcgtatacagctttaaatgatttattttttatgaaaatgttaactgatgagattatatctacatacgtgtgttatgtgtgtggatatagatgcacacatatctgtacatatacatgtgagtgtacatatatacacatatacacatctatgtatggatatgtgtgtatacacatatacacatctctgtccaaaatttcctcaaagatatggggattttttcatgaatccatgtggatgaatgaggtgtctcctttccatacccagtctcaccttctccccaccctacctcacctcttctcaggcacccctcttccccagctgtcctgccagcccttctcgtacagggtggctcctttgaagtggagtaatagggaaggttgctctctgccacagcttgcagcatggtcttgactgaatgtactgttcctgttagcgttacttctcctgtggtcagtaagttgcccagagagaaggaacaaaggtctggagtttacagaatgtctgtttttaaagtcactttatgcgttttccacttttttcttttttaagaaaaagaagtaccatttttgttttgttttgttttgatttttggtggtggataaataatactaaaaggactctagtggaaaggggggatatcgaagagcagggggttgtgaatttccaggtacttggactttttgtagaagtagagagaagaagatgaagtttgccaggagggcccatattttttcagctgaagggtaaaatctttctttgcagagacagtattttgctgaatactttttataatgtgatgattattaaaaaagcaaaaattttggtcacttccaagctagaaggaggaatcagataccctttaatattttttcctcgctccttctggtatatgcatgtcactgcatgataattgagttttcctttgttttaataaaactgttctcagacattaagctaaactaagagaaaaataactttgttgccaaaaggttgtgctatccagattttttatatgtctgcatgtttaaaaaaaaaaaagcaacaaaagaaaatgcactctaacttatgtgaactgagagaaaaaaatcaggttttaaacaggaaaacctatggggaatgatattttttgaaagacttttgtataaagttgagtacttagaaaaaagacaaaccagatgtaatatattttgtggatgtttttatttcttggatttatagtaccttatactaaggttaaaaaaatatgcttgatattgtgaaaaggtgaaattcttcaccaacatttcatttgctcctttgtcatattgtaatgccaatataatatagttaatgaaaacagcatttttaaaaaccgaaatattgaaatggtgtaatgttgtaccatttgcactgtgagcaaatgctaatacagtaaatatattgtgtttgctgacaatcaaaaaaaaaaaaaaaaaaaa

SEQ ID NO: 106 - protein, 387 aa, Homo sapien [sequence omitted]

SEQ ID NO: 107 - DNA, 2294 bp, Homo sapien
ctgcaccaatacactgagtgaaggaagagagacagaggatcaagggctttagacagcactccttcaatatgcaatcacagagaaagatgcgcctgatccaagttaatatctctaaggtgagagccttcttagagtcagtttgttgcaaatttcacctactctgttcttttccatccatccccctgagtcagttggttgaagggagttattttttcaagtggaattcaaacaaagctcaaaccagaactgtaaatagtgattgcaggaattattttctaaactgctttgccctttcctctcactgccttttatagccaatataaatgtctctttgcacaccttttgttgtggttttatattgtaacaccatttttctttgaaactattgtatttaaagtaaggtttcatattatgtcagcaagtaattaacttatgtttaaaaggtggccatatcatgtaccaaaagttgctgaagtttctcttctagctggtaaagtaggagtttgcatgacttcacactttttttgcgtagtttcttctgttgtatgatggcgtgagtgtgtgtcttgggtaccgctgtgtactactgtgtgcctagattccatgcactctcgttgtgtttgaagtaaatattggagaccggagggtaacaggttggcctgttgattacagctagtaatcgctgtgtcttgttccgccccctccctgacaccccagcttcccaggatgtggaaagcctggatctcagctccttgccccatatcccttctgtaatttgtacctaaagagtgtgattatcctaattcaagagtcactaaaactcatcacattatcattgcatatcagcaaagggtaaagtcctagcaccaattgcttcacataccagcatgttccatttccaatttagaattagccacataataaaatcttagaatcttccttgagaaagagctgcctgagatgtagttttgttatatggttccccaccgaccatttttgtgcttttttcttgttttgttttgttttgactgcactgtgagttttgtagtgtcctcttcttgccaaaacaaacgcgagatgaactggacttatgtagacaaatcgtgatgccagtgtatccttcctttcttcagttccagcaataatgaatggtcaacttttttaaaatctagatctctctcattcatttcaatgtatttttactttaagatgaaccaaaattattagacttatttaagatgtacaggcatcagaaaaaagaagcacataatgcttttggtgcgatggcactcactgtgaacatgtgtaaccacatattaatatgcaatattgtttccaatactttctaatacagttttttataatgttgtgtgtggtgattgttcaggtcgaatctgttgtatccagtacagctttaggtcttcagctgcccttctggcgagtacatgcacaggattgtaaatgagaaatgcagtcatatttccagtctgcctctatgatgatgttaaattattgctgtttagctgtgaacaagggatgtaccactggaggaatagagtatccttttgtacacattttgaaatgcttcttctgtagtgatagaacaaataaatgcaacgaatactctgtctgccctatcccgtgaagtccacactggcgtaagagaaggcccagcagagcaggaatctgcctagactttctcccaatgagatcccaatatgagagggagaagagatgggcctcaggacagctgcaataccacttgggaacacatgtggtgtcttgatgtggccagcgcagcagttcagcacaacgtacctcccatctacaacagtgctggacgtgggaattctaagtcccagtcttgagggtgggtggagatggagggcaacaagagatacatttccagttctccactgcagcatgcttcagtcattctgtgagtggccgggcccagggccctcacaatttcactaccttgtcttttacatagtcataagaattatcctcaacatagccttttgacgctgtaaatcttgagtattcatttacccttttctgatctcctggaaacagctgcctgcctgcattgcacttctcttcccgaggagtggggtaaatttaaaagtcaagttatagtttggatgttagtatagaattttgaaattgggaattaaaaatcaggactggggactgggagaccaaaaatttctgatcccatttctgatggatgtgtcacaccttttctgtcaaaataaaatgtcttggaggttatgactccttggtgaaaaaaa

SEQ ID NO: 108 - protein, 20 aa, Homo sapien
MCHTFSVKIKCLGGYDSLVK

SEQ ID NO: 109 - DNA, 732 bp, Homo sapien
tgctgcgaaccacgtgggtcccgggcgcgtttcgggtgctggcggctgcagccggagttcaaacctaagcagctggaaggaaccatggccaactgtgagcgtaccttcattgcgatcaaaccagatggggtccagcggggtcttgtgggagagattatcaagcgttttgagcagaaaggattccgccttgttggtctgaaattcatgcaagcttccgaagatcttctcaaggaacactacgttgacctgaaggaccgtccattctttgccggcctggtgaaatacatgcactcagggccggtagttgccatggtctgggaggggctgaatgtggtgaagacgggccgagtcatgctcggggagaccaaccctgcagactccaagcctgggaccatccgtggagacttctgcatacaagttggcaggaacattatacatggcagtgattctgtggagagtgcagagaaggagatcggcttgtggtttcaccctgaggaactggtagattacacgagctgtgctcagaactggatctatgaatgacaggagggcagaccacattgcttttcacatccatttcccctccttcccatgggcagaggaccaggctgtaggaaatctagttatttacaggaacttcatcataatttggagggaagctcttggagctgtgagttctccctgtacagtgttaccatccccgaccatctgattaaaatgcttcctcccagc

SEQ ID NO: 110 - protein, 152 aa, Homo sapien
MANCERTFIAIKPDGVQRGLVGEIIKRFEQKGFRLVGLKFMQASEDLLKEHYVDLKDRPFFAGLVKYMHSGPVVAMVWEGLNVVKTGRVMLGETNPADSKPGTIRGDFCIQVGRNIIHGSDSVESAEKEIGLWFHPEELVDYTSCAQNWIYE

SEQ ID NO: 111 - DNA, 3683 bp, Homo sapien
gcgagcgcagcggagcctggagagaaggcgctgggctgcgagggcgcgagggcgcgagggcagggggcaaccggaccccgcccgcacccatggcgcccgtcgccgtctgggccgcgctggccgtcggactggagctctgggctgcggcgcacgccttgcccgcccaggtggcatttacaccctacgccccggagcccgggagcacatgccggctcagagaatactatgaccagacagctcagatgtgctgcagcaaatgctcgccgggccaacatgcaaaagtcttctgtaccaagacctcggacaccgtgtgtgactcctgtgaggacagcacatacacccagctctggaactgggttcccgagtgcttgagctgtggctcccgctgtagctctgaccaggtggaaactcaagcctgcactcgggaacagaaccgcatctgcacctgcaggcccggctggtactgcgcgctgagcaagcaggaggggtgccggctgtgcgcgccgctgcgcaagtgccgcccgggcttcggcgtggccagaccaggaactgaaacatcagacgtggtgtgcaagccctgtgccccggggacgttctccaacacgacttcatccacggatatttgcaggccccaccagatctgtaacgtggtggccatccctgggaatgcaagcatggatgcagtctgcacgtccacgtcccccacccggagtatggccccaggggcagtacacttaccccagccagtgtccacacgatcccaacacacgcagccaactccagaacccagcactgctccaagcacctccttcctgctcccaatgggccccagccccccagctgaagggagcactggcgacttcgctcttccagttggactgattgtgggtgtgacagccttgggtctactaataataggagtggtgaactgtgtcatcatgacccaggtgaaaaagaagcccttgtgcctgcagagagaagccaaggtgcctcacttgcctgccgataaggcccggggtacacagggccccgagcagcagcacctgctgatcacagcgccgagctccagcagcagctccctggagagctcggccagtgcgttggacagaagggcgcccactcggaaccagccacaggcaccaggcgtggaggccagtggggccggggaggcccgggccagcaccgggagctcagattcttcccctggtggccatgggacccaggtcaatgtcacctgcatcgtgaacgtctgtagcagctctgaccacagctcacagtgctcctcccaagccagctccacaatgggagacacagattccagcccctcggagtccccgaaggacgagcaggtccccttctccaaggaggaatgtgcctttcggtcacagctggagacgccagagaccctgctggggagcaccgaagagaagcccctgccccttggagtgcctgatgctgggatgaagcccagttaaccaggccggtgtgggctgtgtcgtagccaaggtgggctgagccctggcaggatgaccctgcgaaggggccctggtccttccaggcccccaccactaggactctgaggctctttctgggccaagttcctctagtgccctccacagccgcagcctccctctgacctgcaggccaagagcagaggcagcgagttggggaaagcctctgctgccatggtgtgtccctctcggaaggctggctgggcatggacgttcggggcatgctggggcaagtccctgactctctgtgacctgccccgcccagctgcacctgccagcctggcttctggagcccttgggttttttgtttgtttgtttgtttgtttgtttgtttctccccctgggctctgcccagctctggcttccagaaaaccccagcatccttttctgcagaggggctttctggagaggagggatgctgcctgagtcacccatgaagacaggacagtgcttcagcctgaggctgagactgcgggatggtcctggggctctgtgtagggaggaggtggcagccctgtagggaacggggtccttcaagttagctcaggaggcttggaaagcatcacctcaggccaggtgcagtggctcacgcctatgatcccagcactttgggaggctgaggcgggtggatcacctgaggttaggagttcgagaccagcctggccaacatggtaaaaccccatctctactaaaaatacagaaattagccgggcgtggtggcgggcacctatagtcccagctactcagaagcctgaggctgggaaatcgtttgaacccgggaagcggaggttgcagggagccgagatcacgccactgcactccagcctgggcgacagagcgagagtctgtctcaaaagaaaaaaaaaaaagcaccgcctccaaatgctaacttgtccttttgtaccatggtgtgaaagtcagatgcccagagggcccaggcaggccaccatattcagtgctgtggcctgggcaagataacgcacttctaactagaaatctgccaattttttaaaaaagtaagtaccactcaggccaacaagccaacgacaaagccaaactctgccagccacatccaaccccccacctgccatttgcaccctccgccttcactccggtgtgcctgcagccccgcgcctccttccttgctgtcctaggccacaccatctcctttcagggaatttcaggaactagagatgactgagtcctcgtagccatctctctactcctacctcagcctagaccctcctcctcccccagaggggtgggttcctcttccccactccccaccttcaattcctgggccccaaacgggctgccctgccactttggtacatggccagtgtgatcccaagtgccagtcttgtgtctgcgtctgtgttgcgtgtcgtgggtgtgtgtagccaaggtcggtaagttgaatggcctgccttgaagccactgaagctgggattcctccccattagagtcagccttccccctcccagggccagggccctgcagaggggaaaccagtgtagccttgcccggattctgggaggaagcaggttgaggggctcctggaaaggctcagtctcaggagcatggggataaaggagaaggcatgaaattgtctagcagagcaggggcagggtgataaattgttgataaattccactggacttgagcttggcagctgaactattggagggtgggagagcccagccattaccatggagacaagaagggttttccaccctggaatcaagatgtcagactggctggctgcagtgacgtgcacctgtactcaggaggctgaggggaggatcactggagcccaggagtttgaggctgcagcgagctatgatcgcgccactacactccagcctgagcaacagagtgagaccctgtctcttaaagaaaaaaaaagtcagactgctgggactggccaggtttctgcccacattggacccacatgaggacatgatggagcgcacctgccccctggtggacagtcctgggagaacctcaggcttccttggcatcacagggcagagccgggaagcgatgaatttggagactctgtggggccttggttcccttgtgtgtgtgtgttgatcccaagacaatgaaagtttgcactgtatgctggacggcattcctgcttatcaataaacctgtttgttttaaaaaaaa

SEQ ID NO: 112 - protein, 461 aa, Homo sapien
MAPVAVWAALAVGLELWAAAHALPAQVAFTPYAPEPGSTCRLREYYDQTAQMCCSKCSPGQHAKVFCTKTSDTVCDSCEDSTYTQLWNWVPECLSCGSRCSSDQVETQACTREQNRICTCRPGWYCALSKQEGCRLCAPLRKCRPGFGVARPGTETSDVVCKPCAPGTFSNTTSSTDICRPHQICNVVAIPGNASMDAVCTSTSPTRSMAPGAVHLPQPVSTRSQHTQPTPEPSTAPSTSFLLPMGPSPPAEGSTGDFALPVGLIVGVTALGLLIIGVVNCVIMTQVKKKPLCLQREAKVPHLPADKARGTQGPEQQHLLITAPSSSSSSLESSASALDRRAPTRNQPQAPGVEASGAGEARASTGSSDSSPGGHGTQVNVTCIVNVCSSSDHSSQCSSQASSTMGDTDSSPSESPKDEQVPFSKEECAFRSQLETPETLLGSTEEKPLPLGVPDAGMKPS

SEQ ID NO: 113 - DNA, 6270 bp, Homo sapien
gccctgcttccccttgcacctgcgccgggcggccatggacttgtacagcaccccggccgctgcgctggacaggttcgtggccagaaggctgcagccgcggaaggagttcgtagagaaggcgcggcgcgctctgggcgccctggccgctgccctgagggagcgcgggggccgcctcggtgctgctgccccgcgggtgctgaaaactgtcaagggaggctcctcgggccggggcacagctctcaagggtggctgtgattctgaacttgtcatcttcctcgactgcttcaagagctatgtggaccagagggcccgccgtgcagagatcctcagtgagatgcgggcatcgctggaatcctggtggcagaacccagtccctggtctgagactcacgtttcctgagcagagcgtgcctggggccctgcagttccgcctgacatccgtagatcttgaggactggatggatgttagcctggtgcctgccttcaatgtcctgggtcaggccggctccgcggtcaaacccaagccacaagtctactctaccctcctcaacagtggctgccaagggggcgagcatgcggcctgcttcacagagctgcggaggaactttgtgaacattcgcccagccaagttgaagaacctaatcttgctggtgaagcactggtaccaccaggtgtgcctacaggggttgtggaaggagacgctgcccccggtctatgccctggaattgctgaccatcttcgcctgggagcagggctgtaagaaggatgctttcagcctaggcgaaggcctccgaactgtcctgggcctgatccaacagcatcagcacctgtgtgttttctggactgtcaactatggcttcgaggaccctgcagttgggcagttcttgcagcggcacgttaagagacccaggcctgtgatcctggacccagctgaccccacatgggacctggggaatggggcagcctggcactgggatttgcatgcccaggaggcagcatcctgctatgaccacccatgctttctgagggggatgggggacccagtgcagtcttggaaggggccgggccttccacgtgctggatgctcaggtttgggccaccccatccagctagaccctaaccagaagacccctgaaaacagcaagagcctcaatgctgtgtacccaagagcagggagcaaacctccctcatgcccagctcctggccccactgcggagccagcatcgtacccctctgtgccgggaatggccttggacctgtctcagatccccaccaaggagctggaccgcttcatccaggaccacctgaagccgagcccccagttccaggagcaggtgaaaaaggccatcgacatcatcttgcgctgcctccatgagaactgtgttcacaaggcctcaagagtcagtaaagggggctcatttggccggggcacagacctaagggatggctgtgatgttgaactcatcatcttcctcaactgcttcacggactacaaggaccaggggccccgccgcgcagagatccttgatgagatgcgagcgcacgtagaatcctggtggcaggaccaggtgcccagcctgagccttcagtttcctgagcagaatgtgcctgaggctctgcagttccagctggtgtccacagccctgaagagctggacggatgttagcctgctgcctgccttcgatgctgtggggcagctcagttctggcaccaaaccaaatccccaggtctactcgaggctcctcaccagtggctgccaggagggcgagcataaggcctgcttcgcagagctgcggaggaacttcatgaacattcgccctgtcaagctgaagaacctgattctgctggtgaagcactggtaccgccaggttgcggctcagaacaaaggaaaaggaccagcccctgcctctctgcccccagcctatgccctggagctcctcaccatctttgcctgggagcagggctgcaggcaggattgtttcaacatggcccaaggcttccggacggtgctggggctcgtgcaacagcatcagcagctctgtgtctactggacggtcaactatagcactgaggacccagccatgagaatgcaccttcttggccagcttcgaaaacccagacccctggtcctggaccccgctgatcccacctggaacgtgggccacggtagctgggagctgttggcccaggaagcagcagcgctggggatgcaggcctgctttctgagtagagacgggacatctgtgcagccctgggatgtgatgccagccctcctttaccaaaccccagctggggaccttgacaagttcatcagtgaatttctccagcccaaccgccagttcctggcccaggtgaacaaggccgttgataccatctgttcatttttgaaggaaaactgcttccggaattctcccatcaaagtgatcaaggtggtcaagggtggctcttcagccaaaggcacagctctgcgaggccgctcagatgccgacctcgtggtgttcctcagctgcttcagccagttcactgagcagggcaacaagcgggccgagatcatctccgagatccgagcccagctggaggcatgtcaacaggagcggcagttcgaggtcaagtttgaagtctccaaatgggagaatccccgcgtgctgagcttctcactgacatcccagacgatgctggaccagagtgtggactttgatgtgctgccagcctttgacgccctaggccagctggtctctggctccaggcccagctctcaagtctacgtcgacctcatccacagctacagcaatgcgggcgagtactccacctgcttcacagagctacaacgggacttcatcatctctcgccctaccaagctgaagagcctgatccggctggtgaagcactggtaccagcagtgtaccaagatctccaaggggagaggctccctacccccacagcacgggctggaactcctgactgtgtatgcctgggagcagggcgggaaggactcccagttcaacatggctgagggcttccgcacggtcctggagctggtcacccagtaccgccagctctgtatctactggaccatcaactacaacgccaaggacaagactgttggagacttcctgaaacagcagcttcagaagcccaggcctatcatcctggatccggctgacccgacaggcaacctgggccacaatgcccgctgggacctgctggccaaggaagctgcagcctgcacatctgccctgtgctgcatgggacggaatggcatccccatccagccatggccagtgaaggctgctgtgtgaagttgagaaaatcagcggtcctactggatgaagagaagatggacaccagccctcagcatgaggaaattcagggtcccctaccagatgagagagattgtgtacatgtgtgtgtgagcacatgtgtgcatgtgtgtgcacacgtgtgcatgtgtgtgttttagtgaatctgctctcccagctcacacactcccctgcctcccatggcttacacactaggatccagactccatggtttgacaccagcctgcgtttgcagcttctctgtcacttccatgactctatcctcataccaccactgctgcttcccacccagctgagaatgccccctcctccctgactcctctctgcccatgcaaattagctcacatctttcctcctgctgcaatccatcccttcctcccattggcctctccttgccaaatctaaatactttatatagggatggcagagagttcccatctcatctgtcagccacagtcatttggtactggctacctggagccttatcttctgaagggttttaaagaatggccaattagctgagaagaattatctaatcaattagtgatgtctgccatggatgcagtagaggaaagtggtggtacaagtgccatgattgattagcaatgtctgcactggatatggaaaaaagaaggtgcttgcaggtttacagtgtatatgtgggctattgaagagccctctgagctcggttgctagcaggagagcatgcccatattggcttactttgtctgccacagacacagacagagggagttgggacatgcatgctatggggaccctcttgttggacacctaattggatgcctcttcatgagaggcctccttttcttcaccttttatgctgcactcctcccctagtttacacatcttgatgctgtggctcagtttgccttcctgaatttttattgggtccctgttttctctcctaacatgctgagattctgcatccccacagcctaaactgagccagtggccaaacaaccgtgctcagcctgtttctctctgccctctagagcaaggcccaccaggtccatccaggaggctctcctgacctcaagtccaacaacagtgtccacactagtcaaggttcagcccagaaaacagaaagcactctaggaatcttaggcagaaagggattttatctaaatcactggaaaggctggaggagcagaaggcagaggccaccactggactattggtttcaatattagaccactgtagccgaatcagaggccagagagcagccactgctactgctaatgccaccactacccctgccatcactgccccacatggacaaaactggagtcgagacctaggttagattcctgcaaccacaaacatccatcagggatggccagctgccagagctgcgggaagacggatcccacctccctttcttagcagaatctaaattacagccagacctctggctgcagaggagtctgagacatgtatgattgaatgggtgccaagtgccagggggcggagtccccagcagatgcatcctggccatctgttgcgtggatgagggagtgggtctatctcagaggaaggaacaggaaacaaagaaaggaagccactgaacatcccttctctgctccacaggagtgtcttagacagcctgactctccacaaaccactgttaaaacttacctgctaggaatgctagattgaatgggatgggaagagccttccctcattattgtcattcttggagagaggtgagcaaccaagggaagctcctctgattcacctagaacctgttctctgccgtctttggctcagcctacagagactagagtaggtgaagggacagaggacagggcttctaatacctgtgccatattgacagcctccatccctgtcccccatcttggtgctgaaccaacgctaagggcaccttcttagactcacctcatcgatactgcctggtaatccaaagctagaactctcaggaccccaaactccacctcttggattggccctggctgctgccacacacatatccaagagctcagggccagttctggtgggcagcagagacctgctctgccaagttgtccagcagcagagtggccctggcctgggcatcacaagccagtgatgctcctgggaagaccaggtggcaggtcgcagttgggtaccttccattcccaccacacagactctgggcctccccgcaaaatggctccagaattagagtaattatgagatggtgggaaccagagcaactcaggtgcatgatacaaggagaggttgtcatctgggtagggcagagaggagggcttgctcatctgaacaggggtgtatttcattccaggccctcagtctttggcaatggccaccctggtgttggcatattggccccactgtaacttttgggggcttcccggtctagccacaccctcggatggaaagacttgactgcataaagatgtcagttctccctgagttgattgataggcttaatggtcaccctaaaaacacccacatatgcttttcgatggaaccagataagttgacgctaaagttcttatggaaaaatacacacgcaatagctaggaaaacacagggaaagaagagttctgagcagggcctagtcttagccaatattaaaacatactatgaagcctctgatacttaaacagcatggcgctggtacgtaaatagaccaatgcagttaggtggctctttccaagactctggggaaaaaagtagtaaaaagctaaatgcaatcaatcagcaattgaaagctaagtgagagagccagagggcctccttggtggtaaaagagggttgcatttcttgcagccagaaggcagagaaagtgaagaccaagtccagaactgaatcctaagaaatgcaggactgcaaagaaattggtgtgtgtgtgtgtgtgtgtgtgtgtgtgtgtttaatttttaaaaagtttttattcggaatccgcg

SEQ ID NO: 114 - protein, 1087 aa, Homo sapien
MDLYSTPAAALDRFVARRLQPRKEFVEKARRALGALAAALRERGGRLGAAAPRVLKTVKGGSSGRGTALKGGCDSELVIFLDCFKSYVDQRARRAEILSEMRASLESWWQNPVPGLRLTFPEQSVPGALQFRLTSVDLEDWMDVSLVPAFNVLGQAGSAVKPKPQVYSTLLNSGCQGGEHAACFTELRRNFVNIRPAKLKNLILLVKHWYHQVCLQGLWKETLPPVYALELLTIFAWEQGCKKDAFSLGEGLRTVLGLIQQHQHLCVFWTVNYGFEDPAVGQFLQRHVKRPRPVILDPADPTWDLGNGAAWHWDLHAQEAASCYDHPCFLRGMGDPVQSWKGPGLPRAGCSGLGHPIQLDPNQKTPENSKSLNAVYPRAGSKPPSCPAPGPTAEPASYPSVPGMALDLSQIPTKELDRFIQDHLKPSPQFQEQVKKAIDIILRCLHENCVHKASRVSKGGSFGRGTDLRDGCDVELIIFLNCFTDYKDQGPRRAEILDEMRAHVESWWQDQVPSLSLQFPEQNVPEALQFQLVSTALKSWTDVSLLPAFDAVGQLSSGTKPNPQVYSRLLTSGCQEGEHKACFAELRRNFMNIRPVKLKNLILLVKHWYRQVAAQNKGKGPAPASLPPAYALELLTIFAWEQGCRQDCFNMAQGFRTVLGLVQQHQQLCVYWTVNYSTEDPAMRMHLLGQLRKPRPLVLDPADPTWNVGHGSWELLAQEAAALGMQACFLSRDGTSVQPWDVMPALLYQTPAGDLDKFISEFLQPNRQFLAQVNKAVDTICSFLKENCFRNSPIKVIKVVKGGSSAKGTALRGRSDADLVVFLSCFSQFTEQGNKRAEIISEIRAQLEACQQERQFEVKFEVSKWENPRVLSFSLTSQTMLDQSVDFDVLPAFDALGQLVSGSRPSSQVYVDLIHSYSNAGEYSTCFTELQRDFIISRPTKLKSLIRLVKHWYQQCTKISKGRGSLPPQHGLELLTVYAWEQGGKDSQFNMAEGFRTVLELVTQYRQLCIYWTINYNAKDKTVGDFLKQQLQKPRPIILDPADPTGNLGHNARWDLLAKEAAACTSALCCMGRNGIPIQPWPVKAAV

SEQ ID NO: 115 - DNA, 4052 bp, Homo sapien
gaagtataagtgggattttcaccaaaaccctatccttccccagactccagtgacagtttaacggtcagctgcatcaaggcttgtgtactgtgcagtcttaaaaggcaccactcctgtccatctcggtgaaattgatggtggagcaaaagggagtttaggtggttccggtctggggagaagacgtgcagggtttcagatgcgaaagtcgcacccaaccgcttcactcgggctctaggccatccgcaggggccctgcttccttccacctgcgagctttttctgcagaatgcgggaagccgccgccgccgccacagaggagggggcggaggcagaggcggaggcggcacccaggggccggggcaggggaggccgggaccatcgcagtgacaatttattttcctgcagcagcggcagcagggacggttgctgcaggttcggggtcggccggcctgcgcgtgggcttgcgaggacgctgttcgtcccctgcgctggggtgtccgacagcgaggaggagaacgacgcacggagcccgcgcgactggaaccagcaaagctccatctgtcggcagaggagaagggggaggaggcacggccgaggcaaacgagcggacgcctcgtcgccgggtgccggtatcaccccgctgcaacgccttccagcaaaagccaccgcggcccgggttgcagcagccggacggatgccaaggccacacggcagccacgggggcagccgtcgcagtcgccgtcccacacgggctgcggacaccaagggttgctaatgaagtgattgagaagaaacagtgaacatcctcatttcacagataagacaacatggatcagccttttactgtgaattctctgaaaaagttagctgctatgcctgaccatacagatgtttccctaagcccagaagagcgagtccgtgccctaagcaagcttggttgtaatatcaccatcagtgaagacatcactccacgacgttactttaggtctggagtagagatggagaggatggcgtctgtgtatttggaagaaggaaatttggaaaatgcctttgttctttataataaatttataaccttatttgtagaaaagcttcctaaccatcgagattaccagcaatgtgcagtacctgaaaagcaggatattatgaagaaactgaaggagattgcattcccaaggacagatgaattgaaaaacgaccttttaaagaaatataacgtagaataccaagaatatttgcaaagcaaaaacaaatataaagctgaaattctcaaaaaattggagcatcagagattgatagaggcagaaaggaagcggattgctcagatgcgccagcagcagctagaatcggagcagtttctgtttttcgaagatcaactcaagaagcaagagttagcccgaggtcaaatgcgaagtcagcaaacctcagggctgtcagagcagattgatgggagcgctttgtcctgcttttccacacaccagaacaattccttgctgaatgtatttgcagatcaacctaataaaagtgatgcaaccaattatgctagccactctcctcctgtaaacagggccttaacgccagctgctactctaagtgctgttcagaatttagtggttgaaggactgcgatgtgtagttttgccagaagatctttgccacaaatttctgcaactggcagaatctaatacagtgagaggaatagaaacctgtggaatactctgtggaaaactgacacataatgaatttactattacccatgtaattgtgccaaagcagtctgcgggaccagactattgtgacatggagaatgtagaggaattattcaatgttcaggatcaacatgatctcctcactctaggatggatccatacacatcccactcaaactgcatttttatccagcgttgatcttcacactcactgttcctatcaactcatgttgccagaggccattgccattgtttgctcaccaaagcataaagacactggcatcttcaggctcaccaatgctggcatgcttgaggtttctgcttgtaaaaaaaagggctttcatccacacaccaaggagcccaggctgttcagtattcagaaattcctttctgggataatttctggcactgctttggagatggagcccctgaaaattggctatggaccaaatggattcccactcttggggatctctaggtcatcatcaccatctgaacagctctgagagagacaagaagtggaatggagaaggtgattaggtaatccaagaattgccaggcgaacaattgtgaaaatctttcatagagttcccgatgaaaacaactctttcttgttagccattatctctgcctttcctttctaaagaaaaacacgtcatttcatcttgattatcagtttctcaagtactcatggatgtgaggccaggtaccctgtcaccttggctctgtttgggatgcaatgttgtgtttgtcaccacttcccattccccaaaagcatctttaacatagaccattcattcttcagattcaaaatgcttaagctgaactaacctcaaagggccctcattaatttacagacatttgaataacacccatattcatttctgctactgaaccaaagccttttccaaaaaaatcatctagcaaactgtttttgccaggccaaatattaacaggtatatatatttgcatacataaatatttacctctatgtcttgtgtgtttttgttatgagacagagtctcactctgtcgcccaggctggagtgcagtggcacagtctcagctcactgcaacctccacctcccaggttcaagcgattctcatgcctcagcctcccgagtagcgaggactacaggcgtgcaccaccacgcccagctaatttttgtatttttagtagagatggggttttaccctgttggccagggtggtctcgaattcctgacctctgatgatctgcccgcctggacctctcaaagtgctgggattacagacatgagccactgtgccctgcctctgttttgtgtatttacataaatacatgtctccagagctttaaattcttcttaaattttaaaactagaactaaaccagacattgagaggacccagaaatataccctgactaacgtgggtggaatttcatttggcttgactctttggtgaaaaaaaaaaaaatcaggctctcaaggactcaatttggtgaaccaatgccaaatagaaaaatgttcttgacattttccccaaaatagatgtctaaagattttgcacttcaaattggtactttatgtattaaaagtgatattgaaactaaattcctacccaattagttgaaaaatatgaaaaaagcaattgctagagaatgcaatttattaaatgttggtggtcttttaaaaaatgaattcctcttgtagccagtgagatcagttatttatttatttattttaatagtaacaaggtctcactatattgtccaggctgatcttgaactcctggcctcaagctgtcctcccatctcagcttcccaaagtgctgagattataggcatgagccaccatgcctggctagttaatggttattaagtaatacaaacatttctgtgaattccaccagatcattgactttggcatagttcacttaagactttgtttgataaaataaatctctttcactctaattaggaagcatttttgggatcctgattaatgctctaatattgtggggccaaaaaatatgtggaacgtggccctgcagttagatgagctgagatcactatagtactatatagcgctctaaatcctaaatgctagatcactgtaatactgtacagatcagccacttgctggcttgtgactctgggccatttacttcacctctcaaaaggcatatttaaagtgaggaaaataataagtttattttggaaattcagttagatgatgcaaattgtttactgtaatttctagcatgtagttcgtgctccatgcatttaactgttattacaggttgtattagtatcacattaaattacccactgaagtgaaagtgaaaccagaatgctgtcaacgatt

SEQ ID NO: 116 - protein, 463 aa, Homo sapien
DNMDQPFTVNSLKKLAAMPDHTDVSLSPEERVRALSKLGCNITISEDITPRRYFRSGVEMERMASVYLEEGNLENAFVLYNKFITLFVEKLPNHRDYQQCAVPEKQDIMKKLKEIAFPRTDELKNDLLKKYNVEYQEYLQSKNKYKAEILKKLEHQRLIEAERKRIAQMRQQQLESEQFLFFEDQLKKQELARGQMRSQQTSGLSEQIDGSALSCFSTHQNNSLLNVFADQPNKSDATNYASHSPPVNRALTPAATLSAVQNLVVEGLRCVVLPEDLCHKFLQLAESNTVRGIETCGILCGKLTHNEFTITHVIVPKQSAGPDYCDMENVEELFNVQDQHDLLTLGWIHTHPTQTAFLSSVDLHTHCSYQLMLPEAIAIVCSPKHKDTGIFRLTNAGMLEVSACKKKGFHPHTKEPRLFSIQKFLSGIISGTALEMEPLKIGYGPNGFPLLGISRSSSPSEQL

SEQ ID NO: 117 - DNA, 1580 bp, Homo sapien
atcccctccggttttcctcagtctccacgtacgtccctcaaagcgcgtcctaaaacccggataaccggagcgctccccatggaccacacggagggcttgcccgcggaggagccgcctgcgcatgctccatcgcctgggaaatttggtgagcggcctccacctaaacgacttactagggaagctatgcgaaattatttaaaagagcgaggggatcaaacagtacttattcttcatgcaaaagttgcacagaagtcatatggaaatgaaaaaaggtttttttgcccacctccttgtgtatatcttatgggcagcggatggaagaaaaaaaaagaacaaatggaacgcgatggttgttctgaacaagagtctcaaccgtgtgcatttattgggataggaaatagtgaccaagaaatgcagcagctaaacttggaaggaaagaactattgcacagccaaaacattgtatatatctgactcagacaagcgaaagcacttcattttttctgtaaagatgttctatggcaacagtgatgacattggtgtgttcctcagcaagcggataaaagtcatctccaaaccttccaaaaagaagcagtcattgaaaaatgctgacttatgcattgcctcaggaacaaaggtggctctgtttaatcgactacgatcccagacagttagtaccagatacttgcatgtagaaggaggtaattttcatgccagttcacagcagtggggagccttttttattcatctcttggatgatgatgaatcagaaggagaagaattcacagtccgagatgtctacatccattatggacaaacatgcaaacttgtgtgctcagttactggcatggcactcccaagattgataattatgaaagttgataagcataccgcattattggatgcagatgatcctgtgtcacaactccataaatgtgcattttaccttaaggatacagaaagaatgtatttgtgcctttctcaagaaagaataattcaatttcaggccactccatgtccaaaagaaccaaataaagagatgataaatgatggcgcttcctggacaatcattagcacagataaggcagagtatacattttatgagggaatgggccctgtccttgccccagtcactcctgtgcctgtggtagagagccttcagttgaatggcggtggggacgtagcaatgcttgaacttacaggacagaatttcactccaaatttacgagtgtggtttggggatgtagaagctgaaactatgtacaggtgtggagagagtatgctctgtgtcgtcccagacatttctgcattccgagaaggttggagatgggtccggcaaccagtccaggttccagtaactttggtccgaaatgatggaatcatttattccaccagccttacctttacctacacaccagaaccagggccacggccacattgcagtgtagcaggagcaatccttccagccaattcaagccaggtgccccctaacgaatcaaacacaaacagcgagggaagttacacaaacgccagcacaaattcaaccagtgtcacatcatctacagccacagtggtatccta

SEQ ID NO: 118 - protein, 500 aa, Homo sapien
MDHTEGLPAEEPPAHAPSPGKFGERPPPKRLTREAMRNYLKERGDQTVLILHAKVAQKSYGNEKRFFCPPPCVYLMGSGWKKKKEQMERDGCSEQESQPCAFIGIGNSDQEMQQLNLEGKNYCTAKTLYISDSDKRKHFIFSVKMFYGNSDDIGVFLSKRIKVISKPSKKKQSLKNADLCIASGTKVALFNRLRSQTVSTRYLHVEGGNFHASSQQWGAFFIHLLDDDESEGEEFTVRDVYIHYGQTCKLVCSVTGMALPRLIIMKVDKHTALLDADDPVSQLHKCAFYLKDTERMYLCLSQERIIQFQATPCPKEPNKEMINDGASWTIISTDKAEYTFYEGMGPVLAPVTPVPVVESLQLNGGGDVAMLELTGQNFTPNLRVWFGDVEAETMYRCGESMLCVVPDISAFREGWRWVRQPVQVPVTLVRNDGIIYSTSLTFTYTPEPGPRPHCSVAGAILPANSSQVPPNESNTNSEGSYTNASTNSTSVTSSTATVVS

SEQ ID NO: 119 - DNA, 960 bp, Homo sapien
ggtaaagagacaacttacagattgggagaatatatttccaaactattgttggggctcagaaacggataccctaacatatagtgatttgacaggtggaactaaagaagactcgaggtctctctgacctcctcctcaacctctgtttcttaatcctctgttttcccagagcacaggaggaagttctctgaagttcctttatctgctttaagttcagactcaccaaataagaaaacagttaattctggtgccttccatgggttttcattaactgaagtcatattgtaggaaaaagaatgaagtctcttaacccacctggatagatttttctcacaaaccattgtcttctctgcaagcccagtagactttgtcccaggccatttatgtgatcttcaccccattaagttctccccaaattatttactcttcccccaaaatcacccacacttccccatctccctctcccctaaggacaagggtatatcaccatctataccccattgcttggtggggtgatcactctgattctctgcatgcatttttatagatttgtttgccatttatcctattaatctgcattctgtcaattgtggcaagttatcagcatattttttaacttttaattattattaatggaaagacacttctgtatacactggaaatctcaggaaatttcttttttccttaagcttaattgaaatgtttacttttcagtaaaatttcaagcttgagtaatgttcatgcctgcttttcattgaaatagaatgaaaaggttgcacaatattattttcatgaaattacttctagtataattctgaataaacactttgaaaggcagtgaactgtaaatatattacagctatctcttattcttcagggcgggtctcaattatgtaaaagatgattggctttctgttttaagtaatagtcattttgaaaacactttaaaactgtcaagtgaag

SEQ ID NO: 120 - protein, 40 aa, Homo sapien
VKRQLTDWENIFPNYCWGSETDTLTYSDLTGGTKEDSRSL

SEQ ID NO: 121 - DNA, 3068 bp, Homo sapien
cggcagccagctgagagcaatgggaaatggggagtcccagctgtcctcggtgcctgctcagaagctgggttggtttatccaggaatacctgaagccctacgaagaatgtcagacactgatcgacgagatggtgaacaccatctgtgacgtctgcaggaaccccgaacagttccccctggtgcagggagtggccataggtggctcctatggacggaaaacagtcttaagaggcaactccgatggtacccttgtccttttcttcagtgacttaaaacaattccaggatcagaagagaagccaacgtgacatcctcgataaaactggggataagctgaagttctgtctgttcacgaagtggttgaaaaacaatttcgagatccagaagtcccttgatgggtccaccatccaggtgttcacaaaaaatcagagaatctctttcgaggtgctggccgccttcaacgctctgagcttaaatgataatcccagcccctggatctatcgagagctcaaaagatccttggataagacaaatgccagtcctggtgagtttgcagtctgcttcactgaactccagcagaagttttttgacaaccgtcctggaaaactaaaggatttgatcctcttgataaagcactggcatcaacagtgccagaaaaaaatcaaggatttaccctcgctgtctccgtatgccctggagctgcttacggtgtatgcctgggaacaggggtgcagaaaagacaactttgacattgctgaaggcgtcagaacggttctggagctgatcaaatgccaggagaagctgtgtatctattggatggtcaactacaactttgaagatgagaccatcaggaacatcctgctgcaccagctccaatcagcgaggccagtaatcttggatccagttgacccaaccaataatgtgagtggagataaaatatgctggcaatggctgaaaaaagaagctcaaacctggttgacttctcccaacctggataatgagttacctgcaccatcttggaatgtcctgcctgcaccactcttcacgaccccaggccaccttctggataagttcatcaaggagtttctccagcccaacaaatgcttcctagagcagattgacagtgctgttaacatcatccgtacattccttaaagaaaactgcttccgacaatcaacagccaagatccagattgtccggggaggatcaaccgccaaaggcacagctctgaagactggctctgatgccgatctcgtcgtgttccataactcacttaaaagctacacctcccaaaaaaacgagcggcacaaaatcgtcaaggaaatccatgaacagctgaaagccttttggagggagaaggaggaggagcttgaagtcagctttgagcctcccaagtggaaggctcccagggtgctgagcttctctctgaaatccaaagtcctcaacgaaagtgtcagctttgatgtgcttcctgcctttaatgcactgggtcagctgagttctggctccacacccagccccgaggtttatgcagggctcattgatctgtataaatcctcggacctcccgggaggagagttttctacctgtttcacagtcctgcagcgaaacttcattcgctcccggcccaccaaactaaaggatttaattcgcctggtgaagcactggtacaaagagtgtgaaaggaaactgaagccaaaggggtctttgcccccaaagtatgccttggagctgctcaccatctatgcctgggagcaggggagtggagtgccggattttgacactgcagaaggtttccggacagtcctggagctggtcacacaatatcagcagctcggcatcttctggaaggtcaattacaactttgaagatgagaccgtgaggaagtttctactgagccagttgcagaaaaccaggcctgtgatcttggacccaggcgaacccacaggtgacgtgggtggaggggaccgttggtgttggcatcttctggacaaagaagcaaaggttaggttatcctctccctgcttcaaggatgggactggaaacccaataccaccttggaaagtgccggtaaaagtcatctaaaggaggcgttgtctggaaatagccctgtaacaggcttgaatcaaagaacttctcctactgtagcaacctgaaattaactcagacacaaataaaggaaacccagctcacaggagcttaaacagctggtcagcccccctaagcccccactacaagtgatcctcaggcaggtaaccccagattcatgcactgtagggctgggcgcagcatccctaggtctctacccagtagatgccactagccctcctctcccagtgacaaccaaaagtcttcacatgttcaaacgttcccctgggttcacagatctttctgcctttggcttttggctccaccctctttagctgttaatttgagtacttatggccctgaaagcggccacggtgcctccagatggcaggtttgcaatccaagcaggaagaaggaaaagatacccaaaggtcaagaacacagtgattttattagaagtttcatccgcaaattttcttccatttcattgctcagaatgtcatgtggttacctgtaacttgaaggtggctacaaagatgactgtggaggtggttgcacttgccacccaaggatgtctgccacacctctccaagccctcctacctaccaagatatacctgatatatccaccagatatctcctcagatatacttggttctctccaccaggttctttctttaaagcaggattctcaactttgatacttactcacattgggctagacagttctttgtttggaggctctcttgtgcatgtaggatgttgagcagcatgtgtggcctgtacccagtacatgccacccagttgtgacaattaaaagtgtcttgagactttatcatgtgtcttctgccctaggtgagaacccttgcactacaggaaccctacacccaacctggggggaatgtagggaagaggtgccaagccaaccgtggggttagctctaattattaagttatgcattataaataaataccaaaaaattg

SEQ ID NO: 122 - protein, 687 aa, Homo sapien
MGNGESQLSSVPAQKLGWFIQEYLKPYEECQTLIDEMVNTICDVCRNPEQFPLVQGVAIGGSYGRKTVLRGNSDGTLVLFFSDLKQFQDQKRSQRDILDKTGDKLKFCLFTKWLKNNFEIQKSLDGSTIQVFTKNQRISFEVLAAFNALSLNDNPSPWIYRELKRSLDKTNASPGEFAVCFTELQQKFFDNRPGKLKDLILLIKHWHQQCQKKIKDLPSLSPYALELLTVYAWEQGCRKDNFDIAEGVRTVLELIKCQEKLCIYWMVNYNFEDETIRNILLHQLQSARPVILDPVDPTNNVSGDKICWQWLKKEAQTWLTSPNLDNELPAPSWNVLPAPLFTTPGHLLDKFIKEFLQPNKCFLEQIDSAVNIIRTFLKENCFRQSTAKIQIVRGGSTAKGTALKTGSDADLVVFHNSLKSYTSQKNERHKIVKEIHEQLKAFWREKEEELEVSFEPPKWKAPRVLSFSLKSKVLNESVSFDVLPAFNALGQLSSGSTPSPEVYAGLIDLYKSSDLPGGEFSTCFTVLQRNFIRSRPTKLKDLIRLVKHWYKECERKLKPKGSLPPKYALELLTIYAWEQGSGVPDFDTAEGFRTVLELVTQYQQLGIFWKVNYNFEDETVRKFLLSQLQKTRPVILDPGEPTGDVGGGDRWCWHLLDKEAKVRLSSPCFKDGTGNPIPPWKVPVKVI

SEQ ID NO: 123 - DNA, 590 bp, Homo sapien
  unsure 24, 28: unknown base
ctactactactaaattcgcggccnctcnggaattggcgacttcgatattaacaaggatggcggcggccgcagcaagtcgaggagtcggggcaaagctgggcctgcgtgagattcgcatccacttatgtcagcgctcgcccggcagccagggcgtcagggacttcattgagaaacgctacgtggagctgaagaaggcgaatcccgacctacccatcctaatccgcgaatgctccgatgtgcagcccaagctctgggcccgctacgcatttggccaagagacgaatgtccctttgaacaacttcagtgctgatcaggtaaccagagccctggagaacgttctaagtggtaaagcctgaagcctccactgaggattaagagcaacagccccagagcctgggctctgctggacttagtataatgtgaaaaaaatgtgttctcctattcctcataaagcttgtgctgtaaaatactttctcagggtgttcttgtcctcatctaccctctaaccccttaatggtgcaaccactgaggcaaagtagcttaatataaaaattaaactttattctggcctcatcaaaaaaaaaaaaaaa

SEQ ID NO: 124 - protein, 99 aa, Homo sapien
MAAAAASRGVGAKLGLREIRIHLCQRSPGSQGVRDFIEKRYVELKKANPDLPILIRECSDVQPKLWARYAFGQETNVPLNNFSADQVTRALENVLSGKA

SEQ ID NO: 125 - DNA, 1030 bp, Homo sapien
  Unknown 653, 906, 908, 917, 944: unknown nucleic acid
ctggtgggcgtcaggggcaggcaacagagtggcggccgctacggccctggaacggggccatggagaagctgcggcgagtcctgagcggccaggacgacgaggagcagggcctgactgcgcaggtcctggatgcctcatcccttagtttcaacaccagattgaaatggtttgccatctgcttcgtatgtggcgttttcttttctattcttggaactggattgctgtggcttccgggcggcataaagctttttgcagtgttttataccctcggcaatcttgctgcgttagccagtacatgctttttaatgggacctgtgaagcaactgaagaaaatgtgtgaagcaacaagattgcttgcaacaattgttatgcttttgtgtttcatatttaccctgtgtgctgctctttggtggcataagaaaggactggctgtgttattctgcatattgcagttcttgtcaatgacctggtatagcctgtcgtacatcccatatgcaagggatgcagttattaaatgctgttcttctctcctaagttgaaaatcagaaacttgtggaaaagagcacttgaatgttggtactctatgtttggtgaagtttgcttttccccataaaacactccaggaacaactgacgtgacagttgaagaccgtnttgtactaagtctcattttgtatactggtaaaaactacatgcttgattaaaccattaaatgcttgtaactttaaattcattatgtgtcattaatatacttttccaaagataagatttttaatcactgccagttgtaaattatttttagccaatttttaaatcttttcaaagcagctttgaaatgtgaatatttaaaggtagacctgtgctgcaagataattaaacttttttgcttttaaaaaatgtctgcatntntaagatttnttttactttaaatgtgaaacttatttnaagctaaaaattgcttattatatgtaataaaaataatatataaatctttacaattttgaaataaacccatccttggaaaaataaat

SEQ ID NO: 126 - protein, 178 aa, Homo sapien
GGRQGQATEWRPLRPWNGAMEKLRRVLSGQDDEEQGLTAQVLDASSLSFNTRLKWFAICFVCGVFFSILGTGLLWLPGGIKLFAVFYTLGNLAALASTCFLMGPVKQLKKMCEATRLLATIVMLLCFIFTLCAALWWHKKGLAVLFCILQFLSMTWYSLSYIPYARDAVIKCCSSLLS

SEQ ID NO: 127 - DNA, 1596 bp, Homo sapien
tgtcggggacggtaaccgggacccgtgctctgctcctgtcgccttcgcctcctgaatccctagccatatgcgtgagtgcatctccatccacgttggccaggctggtgtccagattggcaatgcctgctgggagctctactgcctggaacacggcatccagcccgatggccagatgccaagtgacaagaccattgggggaggagatgactccttcaacaccttcttcagtgagacgggcgctggcaagcacgtgccccgggctgtgtttgtagacttggaacccacagtcattgatgaagttcgcactggcacctaccgccagctcttccaccctgagcagctcatcacaggcaaggaagatgctgccaataactatgcccgagggcactacaccattggcaaggagatcattgaccttgtgttggaccgaattcgcaagctggctgaccagtgcacccgtcttcagggcttcttggttttccacagctttggtgggggaactggttctgggttcacctccctgctcatggaacgcctgtcagttgattatggcaagaaatccaagctggagttctccatttacccggcaccccaggtttccacagctgtagttgagccctacaactccatcctcaccacccacaccaccctggagcactctgattgtgccttcatggtagacaatgaggccatctatgacatctgtcgtagaaacctcgatatcgagcgcccaacctacactaaccttaaccgccttattagccagattgtgtcctccatcactgcttccctgagatttgatggagccctgaatgttgacctgacagaattccagaccaacctggtcccctacccccgcatccacttccctctggccacatatgcccctgtcatctctgctgagaaagcctaccatgaacagctttctgtagcagacatcaccaatgcttgctttgagccagccaaccagatggtgaaatgtgaccctggccatggtaaatacatggcttgctgcctgttgtaccgtggtgacgtggttcccaaagatgtcaatgctgccattgccaccatcaaaaccaagcgcacgatccagtttgtggattggtgccccactggcttcaaggttggcatcaactaccagcctcccactgtggtgcctggtggagacctggccaaggtacagagagctgtgtgcatgctgagcaacaccacagccattgctgaggcctgggctcgcctggaccacaagtttgacctgatgtatgccaagcgtgcctttgttcactggtacgtgggtgaggggatggaggaaggcgagttttcagaggcccgtgaagatatggctgcccttgagaaggattatgaggaggttggtgtggattctgttgaaggagagggtgaggaagaaggagaggaatactaattatccattccttttggccctgcagcatgtcatgctcccagaatttcagcttcagcttaactgacagatgttaaagctttctggttagattgttttcacttggtgatcatgtcttttccatgtgtacctgtaatatttttccatcatatctcaaagtaaagtcattaacatca

SEQ ID NO: 128 - protein, 451 aa, Homo sapien
MRECISIHVGQAGVQIGNACWELYCLEHGIQPDGQMPSDKTIGGGDDSFNTFFSETGAGKHVPRAVFVDLEPTVIDEVRTGTYRQLFHPEQLITGKEDAANNYARGHYTIGKEIIDLVLDRIRKLADQCTRLQGFLVFHSFGGGTGSGFTSLLMERLSVDYGKKSKLEFSIYPAPQVSTAVVEPYNSILTTHTTLEHSDCAFMVDNEAIYDICRRNLDIERPTYTNLNRLISQIVSSITASLRFDGALNVDLTEFQTNLVPYPRIHFPLATYAPVISAEKAYHEQLSVADITNACFEPANQMVKCDPGHGKYMACCLLYRGDVVPKDVNAAIATIKTKRTIQFVDWCPTGFKVGINYQPPTVVPGGDLAKVQRAVCMLSNTTAIAEAWARLDHKFDLMYAKRAFVHWYVGEGMEEGEFSEAREDMAALEKDYEEVGVDSVEGEGEEEGEEY

SEQ ID NO: 129 - DNA, 1672 bp, Homo sapien
ggcacgagggtttgcacctcgctgctccagcctctggggcgcattccaaccttccagcctgcgacctgcggagaaaaaaaattacttattttcttgccccatacataccttgaggcgagcaaaaaaattaaattttaaccatgagggaaatcgtgcacatccaggctggtcagtgtggcaaccagatcggtgccaagttctgggaggtgatcagtgatgaacatggcatcgaccccaccggcacctaccacggggacagcgacctgcagctggaccgcatctctgtgtactacaatgaagccacaggtggcaaatatgttcctcgtgccatcctggtggatctagaacctgggaccatggactctgttcgctcaggtccttttggccagatctttagaccagacaactttgtatttggtcagtctggggcaggtaacaactgggccaaaggccactacacagagggcgccgagctggttgattctgtcctggatgtggtacggaaggaggcagagagctgtgactgcctgcagggcttccagctgacccactcactgggcgggggcacaggctctggaatgggcactctccttatcagcaagatccgagaagaataccctgatcgcatcatgaataccttcagtgtggtgccttcacccaaagtgtctgacaccgtggtcgagccctacaatgccaccctctccgtccatcagttggtagagaatactgatgagacctattgcattgacaacgaggccctctatgatatctgcttccgcactctgaagctgaccacaccaacctacggggatctgaaccaccttgtctcagccaccatgagtggtgtcaccacctgcctccgtttccctggccagctcaatgctgacctccgcaagttggcagtcaacatggtccccttcccacgtctccatttctttatgcctggctttgcccctctcaccagccgtggaagccagcagtatcgagctctcacagtgccggaactcacccagcaggtcttcgatgccaagaacatgatggctgcctgtgacccccgccacggccgatacctcaccgtggctgctgtcttccgtggtcggatgtccatgaaggaggtcgatgagcagatgcttaacgtgcagaacaagaacagcagctactttgtggaatggatccccaacaatgtcaagacagccgtctgtgacatcccacctcgtggcctcaagatggcagtcaccttcattggcaatagcacagccatccaggagctcttcaagcgcatctcggagcagttcactgccatgttccgccggaaggccttcctccactggtacacaggcgagggcatggacgagatggagttcaccgaggctgagagcaacatgaacgacctcgtctctgagtatcagcagtaccaggatgccaccgcagaagaggaggaggatttcggtgaggaggccgaagaggaggcctaaggcagagcccccatcacctcaggcttctcagttcccttagccgtcttactcaactgcccctttcctctccctcagaatttgtgtttgctgcctctatcttgttttttgttttttcttctggggggggtctagaacagtgcctggcacatagtaggcgctcaataaatacttgtttgttgaaaaaaaaaaaaaaaaaa

SEQ ID NO: 130 - protein, 444 aa, Homo sapien
MREIVHIQAGQCGNQIGAKFWEVISDEHGIDPTGTYHGDSDLQLDRISVYYNEATGGKYVPRAILVDLEPGTMDSVRSGPFGQIFRPDNFVFGQSGAGNNWAKGHYTEGAELVDSVLDVVRKEAESCDCLQGFQLTHSLGGGTGSGMGTLLISKIREEYPDRIMNTFSVVPSPKVSDTVVEPYNATLSVHQLVENTDETYCIDNEALYDICFRTLKLTTPTYGDLNHLVSATMSGVTTCLRFPGQLNADLRKLAVNMVPFPRLHFFMPGFAPLTSRGSQQYRALTVPELTQQVFDAKNMMAACDPRHGRYLTVAAVFRGRMSMKEVDEQMLNVQNKNSSYFVEWIPNNVKTAVCDIPPRGLKMAVTFIGNSTAIQELFKRISEQFTAMFRRKAFLHWYTGEGMDEMEFTEAESNMNDLVSEYQQYQDATAEEEEDFGEEAEEEA

SEQ ID NO: 131 - DNA, 2545 bp, Homo sapien
atccaatacaggagtgacttggaactccattctatcactatgaagaaaagtggtgttcttttcctcttgggcatcatcttgctggttctgattggagtgcaaggaaccccagtagtgagaaagggtcgctgttcctgcatcagcaccaaccaagggactatccacctacaatccttgaaagaccttaaacaatttgccccaagcccttcctgcgagaaaattgaaatcattgctacactgaagaatggagttcaaacatgtctaaacccagattcagcagatgtgaaggaactgattaaaaagtgggagaaacaggtcagccaaaagaaaaagcaaaagaatgggaaaaaacatcaaaaaaagaaagttctgaaagttcgaaaatctcaacgttctcgtcaaaagaagactacataagagaccacttcaccaataagtattctgtgttaaaaatgttctattttaattataccgctatcattccaaaggaggatggcatataatacaaaggcttattaatttgactagaaaatttaaaacattactctgaaattgtaactaaagttagaaagttgattttaagaatccaaacgttaagaattgttaaaggctatgattgtctttgttcttctaccacccaccagttgaatttcatcatgcttaaggccatgattttagcaatacccatgtctacacagatgttcacccaaccacatcccactcacaacagctgcctggaagagcagccctaggcttccacgtactgcagcctccagagagtatctgaggcacatgtcagcaagtcctaagcctgttagcatgctggtgagccaagcagtttgaaattgagctggacctcaccaagctgctgtggccatcaacctctgtatttgaatcagcctacaggcctcacacacaatgtgtctgagagattcatgctgattgttattgggtatcaccactggagatcaccagtgtgtggctttcagagcctcctttctggctttggaagccatgtgattccatcttgcccgctcaggctgaccactttatttctttttgttcccctttgcttcattcaagtcagctcttctccatcctaccacaatgcagtgcctttcttctctccagtgcacctgtcatatgctctgatttatctgagtcaactcctttctcatcttgtccccaacaccccacagaagtgctttcttctcccaattcatcctcactcagtccagcttagttcaagtcctgcctcttaaataaacctttttggacacacaaattatcttaaaactcctgtttcacttggttcagtaccacatgggtgaacactcaatggttaactaattcttgggtgtttatcctatctctccaaccagattgtcagctccttgagggcaagagccacagtatatttccctgtttcttccacagtgcctaataatactgtggaactaggttttaataattttttaattgatgttgttatgggcaggatggcaaccagaccattgtctcagagcaggtgctggctctttcctggctactccatgttggctagcctctggtaacctcttacttattatcttcaggacactcactacagggaccagggatgatgcaacatccttgtctttttatgacaggatgtttgctcagcttctccaacaataagaagcacgtggtaaaacacttgcggatattctggactgtttttaaaaaatatacagtttaccgaaaatcatataatcttacaatgaaaaggactttatagatcagccagtgaccaaccttttcccaaccatacaaaaattccttttcccgaaggaaaagggctttctcaataagcctcagctttctaagatctaacaagatagccaccgagatccttatcgaaactcattttaggcaaatatgagttttattgtccgtttacttgtttcagagtttgtattgtgattatcaattaccacaccatctcccatgaagaaagggaacggtgaagtactaagcgctagaggaagcagccaagtcggttagtggaagcatgattggtgcccagttagcctctgcaggatgtggaaacctccttccaggggaggttcagtgaattgtgtaggagaggttgtctgtggccagaatttaaacctatactcactttcccaaattgaatcactgctcacactgctgatgatttagagtgctgtccggtggagatcccacccgaacgtcttatctaatcatgaaactccctagttccttcatgtaacttccctgaaaaatctaagtgtttcataaatttgagagtctgtgacccacttaccttgcatctcacaggtagacagtatataactaacaaccaaagactacatattgtcactgacacacacgttataatcatttatcatatatatacatacatgcatacactctcaaagcaaataatttttcacttcaaaacagtattgacttgtataccttgtaatttgaaatattttctttgttaaaatagaatggtatcaataaatagaccattaatcag

SEQ ID NO: 132 - protein, 125 aa, Homo sapien
MKKSGVLFLLGIILLVLIGVQGTPVVRKGRCSCISTNQGTIHLQSLKDLKQFAPSPSCEKIEIIATLKNGVQTCLNPDSADVKELIKKWEKQVSQKKKQKNGKKHQKKKVLKVRKSQRSRQKKTT

SEQ ID NO: 133 - DNA, 2000 bp, Homo sapien
tctcggcccggcatcattgtgggaagagctgaagcaggcgctcttggctcggcgcggcccgctgcaatccgtggaggaacgcgccgccgagccaccatcatgcctgggcacttacaggaaggcttcggctgcgtggtcaccaaccgattcgaccagttatttgacgacgaatcggaccccttcgaggtgctgaaggcagcagagaacaagaaaaaagaagccggcgggggcggcgttgggggccctggggccaagagcgcgactcaggccgcggcccagaccaactccaacgcggcaggcaaacagctgcgcaaggagtcccagaaagaccgcaagaacccgctgccccccagcgttggcgtggttgacaagaaagaggagacgcagccgcccgtggcgtttaagaaagaaggaataagacgagttggaagaagacctgatcaacaacttcagggtgaagggaaaataattgatagaagaccagaaaggcgaccacctcgtgaacgaagattcgaaaagccacttgaagaaaagggtgaaggaggcgaattttcagttgatagaccgattattgaccgacctattcgaggtcgtggtggtcttggaagaggtcgagggggccgtggacgtggaatgggccgaggagatggatttgattctcgtggcaaacgtgaatttgataggcatagtggaagtgatagatcttctttttcacattacagtggcctgaagcacgaggacaaacgtggaggtagcggatctcacaactggggaactgtcaaagacgaattaactgacttggatcaatcaaatgtgactgaggaaacacctgaaggtgaagaacatcatccagtggcagacactgaaaataaggagaatgaagttgaagaggtaaaagaggagggtccaaaagagatgactttggatgagtggaaggctattcaaaataaggaccgggcaaaagtagaatttaatatccgaaaaccaaatgaaggtgctgatgggcagtggaagaagggatttgttcttcataaatcaaagagtgaagaggctcatgctgaagattcggttatggaccatcatttccggaagccagcaaatgatataacgtctcagctggagatcaattttggagaccttggccgcccaggacgtggcggcaggggaggacgaggtggacgtgggcgtggtgggcgcccaaaccgtggcagcaggaccgacaagtcaagtgcttctgctcctgatgtggatgacccagaggcattcccagctctggcttaactggatgccataagacaaccctggttcctttgtgaacccttctgttcaaagcttttgcatgcttaaggattccaaacgactaagaaattaaaaaaaaaaagactgtcattcataccattcacacctaaagactgaattttatctgttttaaaaatgaacttctcccgctacacagaagtaacaaatatggtagtcagttttgtatttagaaatgtattggtagcagggatgttttcataattttcagagattatgcattcttcatgaatacttttgtattgctgcttgcaaatatgcatttccaaacttgaaatataggtgtgaacagtgtgtaccagtttaaagctttcacttcatttgtgttttttaattaaggatttagaagttcccccaattacaaactggttttaaatattggacatactggttttaatacctgctttgcatattcacacatggtcaactgggacatgttaaactttgatttgtcaaattttatgctgtgtggaatactaactatatgtattttaacttagttttaatattttcatttttggggaaaaatcttttttcacttctcatggatagctgttatatatatatgctaaatctttatatacagaaatatcagtacttgaaccaattcaaagcacatttgggttattaacccttgctccctgcatggctcattagggtccaaattataactgatttacatt

SEQ ID NO: 134 - protein, 393 aa, Homo sapien
MPGHLQEGFGCVVTNRFDQLFDDESDPFEVLKAAENKKKEAGGGGVGGPGAKSATQAAAQTNSNAAGKQLRKESQKDRKNPLPPSVGVVDKKEETQPPVAFKKEGIRRVGRRPDQQLQGEGKIIDRRPERRPPRERRFEKPLEEKGEGGEFSVDRPIIDRPIRGRGGLGRGRGGRGRGMGRGDGFDSRGKREFDRHSGSDRSSFSHYSGLKHEDKRGGSGSHNWGTVKDELTDLDQSNVTEETPEGEEHHPVADTENKENEVEEVKEEGPKEMTLDEWKAIQNKDRAKVEFNIRKPNEGADGQWKKGFVLHKSKSEEAHAEDSVMDHHFRKPANDITSQLEINFGDLGRPGRGGRGGRGGRGRGGRPNRGSRTDKSSASAPDVDDPEAFPALA

SEQ ID NO: 135 - DNA, 890 bp, Homo sapien
ggcggaccgaagaacgcaggaagggggccggggggacccgcccccggccggccgcagccatgaactccaacgtggagaacctacccccgcacatcatccgcctggtgtacaaggaggtgacgacactgaccgcagacccacccgatggcatcaaggtctttcccaacgaggaggacctcaccgacctccaggtcaccatcgagggccctgaggggaccccatatgctggaggtctgttccgcatgaaactcctgctggggaaggacttccctgcctccccacccaagggctacttcctgaccaagatcttccacccgaacgtgggcgccaatggcgagatctgcgtcaacgtgctcaagagggactggacggctgagctgggcatccgacacgtactgctgaccatcaagtgcctgctgatccaccctaaccccgagtctgcactcaacgaggaggcgggccgcctgctcttggagaactacgaggagtatgcggctcgggcccgtctgctcacagagatccacgggggcgccggcgggcccagcggcagggccgaagccggtcgggccctggccagtggcactgaagcttcctccaccgaccctggggccccagggggcccgggaggggctgagggtcccatggccaagaagcatgctggcgagcgcgataagaagctggcggccaagaaaaagacggacaagaagcgggcgctgcgggcgctgcggcggctgtagtgggctctcttcctccttccaccgtgaccccaacctctcctgtcccctccctccaactctgtctctaagttatttaaattatggctggggtcggggagggtacagggggcactgggacctggatttgtttttctaaataaagttggaaaagca

SEQ ID NO: 136 - protein, 225 aa, Homo sapien
MNSNVENLPPHIIRLVYKEVTTLTADPPDGIKVFPNEEDLTDLQVTIEGPEGTPYAGGLFRMKLLLGKDFPASPPKGYFLTKIFHPNVGANGEICVNVLKRDWTAELGIRHVLLTIKCLLIHPNPESALNEEAGRLLLENYEEYAARARLLTEIHGGAGGPSGRAEAGRALASGTEASSTDPGAPGGPGGAEGPMAKKHAGERDKKLAAKKKTDKKRALRALRRL

SEQ ID NO: 137 - DNA, 376 bp, Homo sapien
cattgattcataaaggatctttataaatcttattctttgttggctatatagttgccaatatcttctcccaatttgtggcttgcctttccctcccttatgatgttctttgataaaaacaatttattaatggttaagtactaggaagtatgagtgttttaaaattagagcgtgagttgttttaaaaaaccattccctaccctggagtcatgaagatagtcttatatatcgtcttcttaaagctttagttttgcctttcatatttaaatttttttcatgaggaattaatttggtgtatgctaggagatgcctcactaccgtttattgaccaaatctgggttttattcctcctttctgtagttgcaccaaagtcctgttt

SEQ ID NO: 138 - protein, 27 aa, Homo sapien
MLGDASLPFIDQIWVLFLLSVVAPKSC

SEQ ID NO: 139 - DNA, 960 bp, Homo sapien
cccggcatggaggaggagtgccgggtgctctccatacagagccacgtcatccgcggctacgtgggcaaccgggcggccacgttcccgctgcaggttttgggatttgagattgacgcggtgaactctgtccagttttcaaaccacacaggctatgcccactggaagggccaagtgctgaattcagatgagctccaggagttgtacgaaggcctgaggctgaacaacatgaataaatatgactacgtgctcacaggttatacgagggacaagtcgttcctggccatggtggtggacattgtgcaggagctgaagcagcagaaccccaggctggtgtacgtgtgtgatccagtcttgggtgacaagtgggacggcgaaggctcgatgtacgtcccggaggacctccttcccgtctacaaagaaaaagtggtgccgcttgcagacattatcacgcccaaccagtttgaggccgagttactgagtggccggaagatccacagccaggaggaagccttgcgggtgatggacatgctgcactctatgggccccgacaccgtggtcatcaccagctccgacctgccctccccgcagggcagcaactacctgattgtgctggggagtcagaggaggaggaatcccgctggctccgtggtgatggaacgcatccggatggacattcgcaaagtggacgccgtctttgtgggcactggggacctgtttgctgccatgctcctggcgtggacacacaagcaccccaataacctcaaggtggcctgtgagaagaccgtgtctaccttgcaccacgttctgcagaggaccatccagtgtgcaaaagcccaggccggggaaggagtgaggcccagccccatgcagctggagctgcggatggtgcagagcaaaagggacatcgaggacccagagatcgtcgtccaggccacggtgctgtgagggccccgccgcttg

SEQ ID NO: 140 - protein, 312 aa, Homo sapien
MEEECRVLSIQSHVIRGYVGNRAATFPLQVLGFEIDAVNSVQFSNHTGYAHWKGQVLNSDELQELYEGLRLNNMNKYDYVLTGYTRDKSFLAMVVDIVQELKQQNPRLVYVCDPVLGDKWDGEGSMYVPEDLLPVYKEKVVPLADIITPNQFEAELLSGRKIHSQEEALRVMDMLHSMGPDTVVITSSDLPSPQGSNYLIVLGSQRRRNPAGSVVMERIRMDIRKVDAVFVGTGDLFAAMLLAWTHKHPNNLKVACEKTVSTLHHVLQRTIQCAKAQAGEGVRPSPMQLELRMVQSKRDIEDPEIVVQATVL

SEQ ID NO: 141 - DNA, 1697 bp, Homo sapien
ggatcgaggggactctgaccacagcctgtggctgggaagggagacagaggcggcggcggctcaggggaaacgaggctgcagtggtggtagtaggaagatgtcgggcgaggacgagcaacaggagcaaactatcgctgaggacctggtcgtgaccaagtataagatggggggcgacatcgccaacagggtacttcggtccttggtggaagcatctagctcaggtgtgtcggtactcagcctgtgtgagaaaggtgatgccatgattatggaagaaacagggaaaatcttcaagaaagaaaaggaaatgaagaaaggtattgcttttcccaccagcatttcggtaaataactgtgtatgtcacttctcccctttgaagagcgaccaggattatattctcaaggaaggtgacttggtaaaaattgaccttggggtccatgtggatggcttcatcgctaatgtagctcacacttttgtggttgatgtagctcaggggacccaagtaacagggaggaaagcagatgttattaaggcagctcacctttgtgctgaagctgccctacgcctggtcaaacctggaaatcagaacacacaagtgacagaagcctggaacaaagttgcccactcatttaactgcacgccaatagaaggtatgctgtcacaccagttgaagcagcatgtcatcgatggagaaaaaaccattatccagaatcccacagaccagcagaagaaggaccatgaaaaagctgaatttgaggtacatgaagtatatgctgtggatgttctcgtcagctcaggagagggcaaggccaaggatgcaggacagagaaccactatttacaaacgagacccctctaaacagtatggactgaaaatgaaaacttcacgtgccttcttcagtgaggtggaaaggcgttttgatgccatgccgtttactttaagagcatttgaagatgagaagaaggctcggatgggtgtggtggagtgcgccaaacatgaactgctgcaaccatttaatgttctctatgagaaggagggtgaatttgttgcccagtttaaatttacagttctgctcatgcccaatggccccatgcggataaccagtggtcccttcgagcctgacctctacaagtctgagatggaggtccaggatgcagagctaaaggccctcctccagagttctgcaagtcgaaaaacccagaaaaagaaaaaaaagaaggcctccaagactgcagagaatcccaccagtggggaaacattagaagaaaatgaagctggggactgaggtgcgtcccatctccccagcttgctgctcctgcctcatccccttcccaccaaaccccagactctgtgaagtgcagttcttctccacctaggaccgccagcagagcggggggatctccctgcccccaccccagttccccaacccactcccttccaacaacaaccagctccaactgactctggtcttgggaggtgaggcttcccaaccacggaagactactttaaacgaaaaaaagaaattgaataataaaatcaggagtcaaaattcatcgtcttcaaggcccctctttctagccttttctactactctctgcttggtcaaggtttgtgccccactacagaacagggctaaattagccaccaccactgaaaactcagccgaatttttttataccactctgacgtcagcatttttt

SEQ ID NO: 142 - protein, 394 aa, Homo sapien
MSGEDEQQEQTIAEDLVVTKYKMGGDIANRVLRSLVEASSSGVSVLSLCEKGDAMIMEETGKIFKKEKEMKKGIAFPTSISVNNCVCHFSPLKSDQDYILKEGDLVKIDLGVHVDGFIANVAHTFVVDVAQGTQVTGRKADVIKAAHLCAEAALRLVKPGNQNTQVTEAWNKVAHSFNCTPIEGMLSHQLKQHVIDGEKTIIQNPTDQQKKDHEKAEFEVHEVYAVDVLVSSGEGKAKDAGQRTTIYKRDPSKQYGLKMKTSRAFFSEVERRFDAMPFTLRAFEDEKKARMGVVECAKHELLQPFNVLYEKEGEFVAQFKFTVLLMPNGPMRITSGPFEPDLYKSEMEVQDAELKALLQSSASRKTQKKKKKKASKTAENPTSGETLEENEAGD

SEQ ID NO: 143 - DNA, 2856 bp, Homo sapien
gtaaccgctactcccggacaccagaccaccgccttccgtacacaggggcccgcatcccaccctcccggacctaagagcctgggtcccctgtttccggaggtccgcttcccggcccccagattctggcatcccagccctcagtgtccaagacccaggcagcccgggtccccgcctcccggatccaggcgtccgggatctgcgccaccagaacctagcctcctgcagacctccgccatctgggggcactcaacctcctggagccaagggccccacgtcccacccagagaaactctcgtattcccagctcctagggccaaggaacccgggcgctccgaactcccagctttcggacatctggcacacggggcagagcagagaagctcagcgcccagcctggggaatttaaacactccagcttccaagagccaaggaacttcagtgctgtgaactcacaactctaaggagccctccaaagttccagtctccaggtgctgttactcaactcagtcctaggaacgtcgggtcctgggaaggagcccaagcgctcccagccagcttccaggcgctaagaaaccccggtgcttcccatcatggtggccgatcctcctcgagactccaaggggctcgcagcggcggagcccaccgccaacgggggcctggcgctggcctccatcgaggaccaaggcgcggcagcaggcggctactgcggttcccgggaccaggtgcgccgctgccttcgagccaacctgcttgtgctgctgacagtggtggccgtggtggccggcgtggcgctgggactgggggtgtcgggggccgggggtgcgctggcgttgggcccggagcgcttgagcgccttcgtcttcccgggcgagctgctgctgcgtctgctgcggatgatcatcttgccgctggtggtgtgcagcttgatcggcggcgccgccagcctggaccccggcgcgctcggccgtctgggcgcctgggcgctgctctttttcctggtcaccacgctgctggcgtcggcgctcggagtgggcttggcgctggctctgcagccgggcgccgcctccgccgccatcaacgcctccgtgggagccgcgggcagtgccgaaaatgcccccagcaaggaggtgctcgattcgttcctggatcttgcgagaaatatcttcccttccaacctggtgtcagcagcctttcgctcatactctaccacctatgaagagaggaatatcaccggaaccagggtgaaggtgcccgtggggcaggaggtggaggggatgaacatcctgggcttggtagtgtttgccatcgtctttggtgtggcgctgcggaagctggggcctgaaggggagctgcttatccgcttcttcaactccttcaatgaggccaccatggttctggtctcctggatcatgtggtacgcccctgtgggcatcatgttcctggtggctggcaagatcgtggagatggaggatgtgggtttactctttgcccgccttggcaagtacattctgtgctgcctgctgggtcacgccatccatgggctcctggtactgcccctcatctacttcctcttcacccgcaaaaacccctaccgcttcctgtggggcatcgtgacgccgctggccactgcctttgggacctcttccagttccgccacgctgccgctgatgatgaagtgcgtggaggagaataatggcgtggccaagcacatcagccgtttcatcctgcccatcggcgccaccgtcaacatggacggtgccgcgctcttccagtgcgtggccgcagtgttcattgcacagctcagccagcagtccttggacttcgtaaagatcatcaccatcctggtcacggccacagcgtccagcgtgggggcagcgggcatccctgctggaggtgtcctcactctggccatcatcctcgaagcagtcaacctcccggtcgaccatatctccttgatcctggctgtggactggctagtcgaccggtcctgtaccgtcctcaatgtagaaggtgacgctctgggggcaggactcctccaaaattatgtggaccgtacggagtcgagaagcacagagcctgagttgatacaagtgaagagtgagctgcccctggatccgctgccagtccccactgaggaaggaaaccccctcctcaaacactatcgggggcccgcaggggatgccacggtcgcctctgagaaggaatcagtcatgtaaaccccgggagggaccttccctgccctgctgggggtgctctttggacactggattatgaggaatggataaatggatgagctagggctctgggggtctgcctgcacactctggggagccaggggccccagcaccctccaggacaggagatctgggatgcctggctgctggagtacatgtgttcacaagggttactcctcaaaacccccagttctcactcatgtccccaactcaaggctagaaaacagcaagatggagaaataatgttctgctgcgtccccaccgtgacctgcctggcctcccctgtctcagggagcaggtcacaggtcaccatggggaattctagcccccactggggggatgttacaacaccatgctggttattttggcggctgtagttgtggggggatgtgtgtgtgcacgtgtgtgtgtgtgtgtgtgtgtgtgtgtgtgtgtgttctgtgacctcctgtccccatggtacgtcccaccctgtccccagatcccctattccctccacaataacagaaacactcccagggactctggggagaggctgaggacaaatacctgctgtcactccagaggacattttttttagcaataaaattgagtgtcaactatttaaaaaaaaaaaaaaaaa

SEQ ID NO: 144 - protein, 541 aa, Homo sapien
MVADPPRDSKGLAAAEPTANGGLALASIEDQGAAAGGYCGSRDQVRRCLRANLLVLLTVVAVVAGVALGLGVSGAGGALALGPERLSAFVFPGELLLRLLRMIILPLVVCSLIGGAASLDPGALGRLGAWALLFFLVTTLLASALGVGLALALQPGAASAAINASVGAAGSAENAPSKEVLDSFLDLARNIFPSNLVSAAFRSYSTTYEERNITGTRVKVPVGQEVEGMNILGLVVFAIVFGVALRKLGPEGELLIRFFNSFNEATMVLVSWIMWYAPVGIMFLVAGKIVEMEDVGLLFARLGKYILCCLLGHAIHGLLVLPLIYFLFTRKNPYRFLWGIVTPLATAFGTSSSSATLPLMMKCVEENNGVAKHISRFILPIGATVNMDGAALFQCVAAVFIAQLSQQSLDFVKIITILVTATASSVGAAGIPAGGVLTLAIILEAVNLPVDHISLILAVDWLVDRSCTVLNVEGDALGAGLLQNYVDRTESRSTEPELIQVKSELPLDPLPVPTEEGNPLLKHYRGPAGDATVASEKESVM

SEQ ID NO: 145 - DNA, 2642 bp, Homo sapien
aaaaatctatgattcagcttttcatcctgacactggtgagaagatgattttgataggaagaatgtcagcccaggttcccatgaacatgaccatcacaggttgtatgatgacgttttacaggactacgccggctgtgctgttctggcagtggattaaccagtccttcaatgccgtcgtcaattacaccaacagaagtggagacgcacccctcactgtcaatgagttgggaacagcttacgtttctgcaacaactggtgccgtagcaacagctctaggactcaatgcattgaccaagcatgtctcaccactgataggacgttttgttccctttgctgccgtagctgctgctaattgcattaatattccattaatgaggcaaagggaactcaaagttggcattcccgtcacggatgagaatgggaaccgcttgggggagtcggcgaacgctgcgaaacaagccatcacgcaagttgtcgtgtccaggattctcatggcagcccctggcatggccatccctccattcattatgaacactttggaaaagaaagcctttttgaagaggttcccatggatgagtgcacccattcaagttgggttagttggcttctgtttggtgtttgctacacccctgtgttgtgccctgtttcctcagaaaagttccatgtctgtgacaagcttggaggccgagttgcaagctaagatccaagagagccatcctgaattgcgacgcgtgtacttcaataagggattgtaaagcagggaggaaacctctgcagctcattctgccactgcaaagctggtgtagccatgctggtgagaaaaatcctgttcaacctgggttctcccagttacggaaaccttttaaagatccacattagccttttagaataaagctgctactttaacagagcacctggcgtgggccaagtgcctgatactcccttacactgaatcatgttatgatttatagaaatacctttcctgtagcttttatagtcattgtttttcaaagacgatataccagccctcacccaggttttaaaaaagcactggtaggcatagaataggtgctcagtatatggtcagtaaatgttctattgattatcaatcagtgaaaaaagaaatctgtttaaaatactgaattttcatctcactcccattgcaaatcaaggagatctcagcagtgaactgggaaaatacaaaagctctgggctaatctataaaaacttaccctgaaatattaagggcagtttgcttctagtttggggattgcgctagcccaatgaaggtgatgaagcttttggatttggagggtaaaagctccttcacaccccttccaaaagtcagtcacagaccactgcaacatgccttccctgctggatcattatatacattcagattgtgagtggattgccttggttgacttttaatttattgttttttgttcttataaagatgataatcttaccttgcagttattgactttatattcaattatttacatcaaataatgaaataactgaaatgtacaaatgtcaaattttggaagtatattcaataccaatgctgtatgagtgggctgaatccagttcattgttttttttttggtaagaagtgagactacagttccagctacctacatgtcttttcttgtcatccttatagatctctttggctttcagaaagatacagtgataatgtgtgtatgaatcagtcacaatgaattttacttgaatattgtatgttgcattccacttcatttgaaaataatgaaaccatgtaccactgtttacatcatctgtagtgatttcatagataatatatttaatatgacagattatgtttcaactctgtagatgtttaacgtcatagacagttggccctctgtatccgtgagctctatatctgtgaattcaaccaagtttggatggaaaattttttttttttttttttttttttttgagacggagtctcgctctgtcacccaggctggagtgcagtggcgtagtctcggctcactgcaagccccgcctcctgggttcacgccgttctcctgcctcagcctctctgagaagctgggactacaggcgcccgccaccacgcccggctaatttttttgtatttttagtagagacggggtttcactgtggtctcgatctcctgacctcgtgatccgcccgccttggcctcccaaggtgctgggattacaagcgtgagccaccgcacccggcctgaaaatattttctaaaaagataaaaaatatacataacgatgaaaaataatacaaatttaaaaaccaatacagtataacaactatttacatagtgcttacattgtattaggtgttataagcaatctagagatgatttagcaagtatacaggaggatgtgcctaggttatatgcaaatactgtgccattttatatcaggaacttgagcatctgcagatattggtatcggagggcggtcctggaaccaagcatccacggatactgaggggtgacatttcatgaagtgtagatcattgtattcagagattgtaaatgaaaaaaatatagaaactatttagttttggtagattttttttctgacaatgtgaccagactgaatttcctcataaagaaaaaatggcgtgccttgtg

SEQ ID NO: 146 - protein, 236 aa, Homo sapien
MILIGRMSAQVPMNMTITGCMMTFYRTTPAVLFWQWINQSFNAVVNYTNRSGDAPLTVNELGTAYVSATTGAVATALGLNALTKHVSPLIGRFVPFAAVAAANCINIPLMRQRELKVGIPVTDENGNRLGESANAAKQAITQVVVSRILMAAPGMAIPPFIMNTLEKKAFLKRFPWMSAPIQVGLVGFCLVFATPLCCALFPQKSSMSVTSLEAELQAKIQESHPELRRVYFNKGL

SEQ ID NO: 147 - DNA, 1554 bp, Homo sapien
atgctgcgcttcctggcaccccggctgcttagcctccagggcaggaccgccctctactcctcggcagcagccctcccaagccccattctgaacccagacatcccctacaaccagctgttcatcaacaatgaatggcaagatgcagtcagcaagaagaccttcccgacggtcaaccctaccaccggggaggtcatcgggcacgtggctgaaggtgaccgggctgatgtggatcgggccgtgaaagcagcccgggaagccttccgcctggggtccccatggcgccggatggatgcctctgagcggggccggctgctgaacctcctggcagacctagtggagcgggatcgagtctacttggcctcactcgagaccttggacaatgggaagcctttccaagagtcttacgccttggacttggatgaggtcatcaaggtgtatcggtactttgctggctgggctgacaagtggcatggcaagaccatccccatgcatggccagcatttctgcttcacccggcatgagcccgttggtgtctgtggccagatcatcccgtggaacttccccttggtcatgcagggttggaaacttgccccggcactcgccacaggcaacactgtggttatgaaggtggcagagcagacccccctctctgccctgtatttggcctccctcatcaaggaggcaggctttccccctggggtggtgaacatcatcacggggtatggcccaacagcaggtgcggccatcgcccagcacatggatgttgacaaagttgccttcaccggttccaccgaggtgggccacctgatccagaaagcagctggcgattccaacctcaagagagtcaccctggagctgggtggtaagagccccagcatcgtgctggccgatgctgacatggagcatgccgtggagcagtgccacgaagccctgttcttcaacatgggccagtgctgctgtgctggctcccggaccttcgtggaagaatccatctacaatgagtttctcgagagaaccgtggagaaagcaaagcagaggaaagtggggaacccctttgagctggacacccagcaggggcctcaggtggacaaggagcagtttgaacgagtcctaggctacatccagcttggccagaaggagggcgcaaaactcctctgtggcggagagcgtttcggggagcgtggtttcttcatcaagcctactgtctttggtggcgtgcaggatgacatgagaattgccaaagaggagatctttgggcctgtgcagcccctgttcaagttcaagaagattgaggaggtggttgagagggccaacaacaccaggtatggcctggctgcggctgtgttcacccgggatctggacaaggccatgtacttcacccaggcactccaggccgggaccgtgtgggtaaacacctacaacatcgtcacctgccacacgccatttggagggtttaaggaatctggaaacgggagggagctgggtgaggatgggcttaaggcctacacagaggtaaagacggtcaccatcaaggttcctcagaagaactcgtaa

SEQ ID NO: 148 - protein, 517 aa, Homo sapien
MLRFLAPRLLSLQGRTALYSSAAALPSPILNPDIPYNQLFINNEWQDAVSKKTFPTVNPTTGEVIGHVAEGDRADVDRAVKAAREAFRLGSPWRRMDASERGRLLNLLADLVERDRVYLASLETLDNGKPFQESYALDLDEVIKVYRYFAGWADKWHGKTIPMHGQHFCFTRHEPVGVCGQIIPWNFPLVMQGWKLAPALATGNTVVMKVAEQTPLSALYLASLIKEAGFPPGVVNIITGYGPTAGAAIAQHMDVDKVAFTGSTEVGHLIQKAAGDSNLKRVTLELGGKSPSIVLADADMEHAVEQCHEALFFNMGQCCCAGSRTFVEESIYNEFLERTVEKAKQRKVGNPFELDTQQGPQVDKEQFERVLGYIQLGQKEGAKLLCGGERFGERGFFIKPTVFGGVQDDMRIAKEEIFGPVQPLFKFKKIEEVVERANNTRYGLAAAVFTRDLDKAMYFTQALQAGTVWVNTYNIVTCHTPFGGFKESGNGRELGEDGLKAYTEVKTVTIKVPQKNS

SEQ ID NO: 149 - DNA, 2380 bp, Homo sapien
gccaggactccacaaggctggtcccctgccctggagcaacttaaacaggccctctggccagcctggaaccctgagatggcctccagctcaggcagcagtcctcgcccggcccctgatgagaatgagtttccctttgggtgccctcccaccgtctgccaggacccaaaggagcccagggctctctgctgtgcaggctgtctctctgagaacccgaggaatggcgaggatcagatctgccccaaatgcagaggggaagacctccagtctataagcccaggaagccgtcttcgaactcaggagaaggctcaccccgaggtggctgaggctggaattgggtgcccctttgcaggtgtcggctgctccttcaagggaagcccacagtctgtgcaagagcatgaggtcacctcccagacctcccacctaaacctgctgttggggttcatgaaacagtggaaggcccggctgggctgtggcctggagtctgggcccatggccctggagcagaacctgtcagacctgcagctgcaggcagccgtggaagtggcgggggacctggaggtcgattgctaccgggcaccctgctccgagagccaggaggagctggccctgcagcacttcatgaaggagaagcttctggctgagctggaggggaagctgcgtgtgtttgagaacattgttgctgtcctcaacaaggaggtggaggcctcccacctggccctggccacctctatccaccagagccagctggaccgtgagcgcatcctgagcttggagcagagggtggtggagcttcagcagaccctggcccagaaagaccaggccctgggcaagctggagcagagcttgcgcctcatggaggaggcctccttcgatggcactttcctgtggaagatcaccaatgtcaccaggcggtgccatgagtcggcctgtggcaggaccgtcagcctcttctccccagccttctacactgccaagtatggctacaagttgtgcctgcggctgtacctgaatggagatggcactggaaagagaacccatctgtcgctcttcatcgtgatcatgagaggggagtatgatgcgctgctgccgtggcccttccggaacaaggtcaccttcatgctgctggaccagaacaaccgtgagcacgccattgacgccttccggcctgacctaagctcagcgtccttccagaggccccagagtgaaaccaacgtggccagtggatgcccactcttcttccccctcagcaaactgcagtcacccaagcacgcctacgtgaaggacgacacaatgttcctcaagtgcattgtggagaccagcacttagggtgggcggggctcctgagggagctccaactcagaagggagctagccagaggactgtgatgccctgcccttggcacccaagacctcagggcacaaagatgggtgaaggctggcatgatccaagcaagactgaggggtcgacttcgggctggccatctggttaggatggcaggacgtgggctgggcccacaaaggcaaagggtccagaaggagacaggcagagctgctcccctctgcacggaccatgcgacactgggaggccagtgagccactccggccccgaatgttgaggtggactctcaccaaatgagaagaaaatggaaccaggcttggaaccgtaggacccaagcagagaagctctcgggctaggaagatctctgcagggccgccagggagacctggacacaggcctgctctctttttctccagggtcagaaacaggaccgggtggaagggatggggtgccagtttgaatgcagtctgtccaggctcgtcattggaggtgaacaagcaaacccagacggctccactaggacttcaaattgggggttggatttgaagacttttaagtttccttccagcccagaaagtctctcattctagcctcctggcccaggtgagtcctagagctacaggggttctggaaacattcaggagcttcctgtcctcccagctcctcactcaccttcagtaacccccactggactgacctggtccacagggcacctgccaccctgggcctggcagctcagcttcccaacacgcaggagcacacccagcccccacatcctgtgcctccatcagctaaacaccacgtcacttcatgcaggtgaaacccagtcactgtgagctcccaggtgcagccagaggcacctcaagaagaagaggggcataaactttcctcttcctgcctagaggccccacctttggtgctttccagaatcccgtaacacctgattaactgaggcatccacttctttcagcagactgatcaggacctccaagccactgagcaatgtataaccccaaagggaattcaaaaaaaaaaaaaaaaa

SEQ ID NO: 150 - protein, 416 aa, Homo sapien
MASSSGSSPRPAPDENEFPFGCPPTVCQDPKEPRALCCAGCLSENPRNGEDQICPKCRGEDLQSISPGSRLRTQEKAHPEVAEAGIGCPFAGVGCSFKGSPQSVQEHEVTSQTSHLNLLLGFMKQWKARLGCGLESGPMALEQNLSDLQLQAAVEVAGDLEVDCYRAPCSESQEELALQHFMKEKLLAELEGKLRVFENIVAVLNKEVEASHLALATSIHQSQLDRERILSLEQRVVELQQTLAQKDQALGKLEQSLRLMEEASFDGTFLWKITNVTRRCHESACGRTVSLFSPAFYTAKYGYKLCLRLYLNGDGTGKRTHLSLFIVIMRGEYDALLPWPFRNKVTFMLLDQNNREHAIDAFRPDLSSASFQRPQSETNVASGCPLFFPLSKLQSPKHAYVKDDTMFLKCIVETST

SEQ ID NO: 151 - DNA, 2088 bp, Homo sapien
gaattcggcacgagcgcgcggcgaatctcaacgctgcgccgtctgcgggcgcttccgggccaccagtttctctgctttccaccctggcgccccccagccctggctccccagctgcgctgccccgggcgtccacgccctgcgggcttagcgggttcagtgggctcaatctgcgcagcgccacctccatgttgaccaagcctctacaggggcctcccgcgccccccgggacccccacgccgccgccaggaggcaaggatcgggaagcgttcgaggccgagtatcgactcggccccctcctgggtaaggggggctttggcaccgtcttcgcaggacaccgcctcacagatcgactccaggtggccatcaaagtgattccccggaatcgtgtgctgggctggtcccccttgtcagactcagtcacatgcccactcgaagtcgcactgctatggaaagtgggtgcaggtggtgggcaccctggcgtgatccgcctgcttgactggtttgagacacaggaaggcttcatgctggtcctcgagcggcctttgcccgcccaggatctctttgactatatcacagagaagggcccactgggtgaaggcccaagccgctgcttctttggccaagtagtggcagccatccagcactgccattcccgtggagttgtccatcgtgacatcaaggatgagaacatcctgatagacctacgccgtggctgtgccaaactcattgattttggttctggtgccctgcttcatgatgaaccctacactgactttgatgggacaagggtgtacagccccccagagtggatctctcgacaccagtaccatgcactcccggccactgtctggtcactgggcatcctcctctatgacatggtgtgtggggacattccctttgagagggaccaggagattctggaagctgagctccacttcccagcccatgtctccccagactgctgtgccctaatccgccggtgcctggcccccaaaccttcttcccgaccctcactggaagagatcctgctggacccctggatgcaaacaccagccgaggatgttacccctcaacccctccaaaggaggccctgcccctttggcctggtccttgctaccctaagcctggcctggcctggcctggcccccaatggtcagaagagccatcccatggccatgtcacagggatagatggacatttgttgacttggttttacaggtcattaccagtcattaaagtccagtattactaaggtaagggattgaggatcaggggttagaagacataaaccaagtttgcccagttcccttcccaatcctacaaaggagccttcctcccagaacctgtggtccctgattttggagggggaacttcttgcttctcattttgctaaggaagtttattttggtgaagttgttcccattttgagccccgggactcttattttgatgatgtgtcaccccacattggcacctcctactaccaccacacaaacttagttcatatgcttttacttgggcaagggtgctttccttccaataccccagtagcttttattttagtaaagggaccctttcccctagcctagggtcccatattgggtcaagctgcttacctgcctcagcccaggattttttattttgggggaggtaatgccctgttgttaccccaaggcttctttttttttttttttttttttgggtgaggggaccctactttgttatcccaagtgctcttattctggtgagaagaaccttaattccataatttgggaaggaatggaagatggacaccaccggacaccaccagacaataggatgggatggatggttttttgggggatgggctaggggaaataaggcttgctgtttgttttcctggggcgctccctccaattttgcagatttttgcaacctcctcctgagccgggattgtccaattactaaaatgtaaataatcacgtattgtggggaggggagttccaagtgtgccctccttttttttcctgcctggattatttaaaaagccatgtgtggaaacccactatttaataaaagtaatagaatcagaaaaaaaaaaaaaaaaaaa

SEQ ID NO: 152 - protein, 334 aa, Homo sapien
MLTKPLQGPPAPPGTPTPPPGGKDREAFEAEYRLGPLLGKGGFGTVFAGHRLTDRLQVAIKVIPRNRVLGWSPLSDSVTCPLEVALLWKVGAGGGHPGVIRLLDWFETQEGFMLVLERPLPAQDLFDYITEKGPLGEGPSRCFFGQVVAAIQHCHSRGVVHRDIKDENILIDLRRGCAKLIDFGSGALLHDEPYTDFDGTRVYSPPEWISRHQYHALPATVWSLGILLYDMVCGDIPFERDQEILEAELHFPAHVSPDCCALIRRCLAPKPSSRPSLEEILLDPWMQTPAEDVTPQPLQRRPCPFGLVLATLSLAWPGLAPNGQKSHPMAMSQG

SEQ ID NO: 153 - DNA, 3401 bp, Homo sapien
aaaatttgaagacaagatgggcacctactctacaattctgataaaaacagaggtcatcgaatgtgggaactactgtggagtacgcatcattcactctttgattgcagagttctcactggaagaattgaagaaaagctatcacctgaataaaagtcaaattatgttggatatgctaactgagaatttgttcttcgatactggtatgggaaaaagtaaatttttgcaagatatgcacacactcctactcacaagacaccgcgatgaacatgaaggtgaaacaggaaattggttttccccatttattgaagcattacataaagatgaaggaaatgaagcagttgaagctgtattgcttgaaagtatccatcggttcaacccaaatgcattcatttgccaagcgttggcaagacatttctacattaaaaagaaggactttggcaatgctctaaactgggcaaaacaagcaaaaatcatagaacctgacaattcttatatctcagatacactgggtcaagtctacaaaagtaaaataagatggtggatagaggaaaacggaggaaacgggaacatttcagttgatgatctaattgctcttttggatttagcagaacatgcctcaagtgcattcaaagaatctcaacagcaaagtgaagatagagagtatgaagtgaaggaaagattgtatccgaagtcaaaaaggcggtatgatacttacaatatagctggttatcaaggagagatagaagttgggctttacacaatccaaattctccagctcattcctttttttgataataaaaatgagctatctaaaagatatatggtcaattttgtatcaggaagtagtgatattccaggggatccaaacaatgaatataaattagccctcaaaaactatattccttatttaactaaattgaaattttctttgaaaaagtcctttgatttttttgatgaatactttgtcctgctaaaacccaggaacaatattaagcaaaatgaagaggccaaaactcggagaaaggtggctggatattttaagaaatatgtagatatattttgtctcttagaagaatcacaaaacaacacaggtcttggatcaaagttcagtgagccacttcaagtagagagatgcaggagaaacctagtagctttaaaagcagacaagttttctgggctcttggaatatcttatcaaaagtcaagaggatgctataagcactatgaaatgtatagtgaacgaatatacttttctcttagaacaatgcactgtcaaaatccagtcaaaagaaaagctaaatttcatcttggccaacattattctctcctgtatccaacctacctccagattagtaaagccagttgaaaaactaaaagatcagcttcgagaagtcttgcaaccaataggactgacttatcagttttcagaaccgtattttctagcttccctcttattctggccagaaaatcaacaactagatcaacattctgaacaaatgaaagagtatgctcaagcactaaaaaattctttcaaggggcaatataaacatatgcatcgtacaaagcaaccaattgcatatttctttcttggaaaaggtaaaagactggaaagacttgttcacaaaggaaaaattgaccagtgctttaagaagacaccagatattaattccttgtggcagagtggagatgtgtggaaggaggaaaaagtccaagaacttttgcttcgtttacaaggtcgagctgaaaacaattgtttatatatagaatatggaatcaatgaaaaaatcacaatacccatcactcccgcttttttaggtcaacttagaagtggcagaagcatagagaaggtgtctttttacctgggatttcccattggaggcccacttgcttatgacattgaaattgtttaagagcctgatattcttcctccaagaatttgatctcagtacccatttaatttttttggactcaagatctatgctttaaaccggcaaggttatagatacagcctctagctcttcagatctgtacatgcagtatttaatttcctcttaaacatgttatgagttctacaaggacaatagtgaaaaaggaaggagtgagatatatgaaaagtagcaaatatgttccttggtttggttaacatcattgatgacaaaataataaggagctatgactggagtcaggagaagttagtgtaataagctggctacacagaaccccactacttaccaggcatggattgaagaagattgtctactcaaatggcatttagacattagaatgtctgggaaaatatttctcaaagacagcaaaaacctctcaaactgaggagcaacatttattcttactaagcagatcatcaatgtatcatgtgcttggcactcaaggatcttccaaaacagaggaccaaccagtcttctgaaggtcatgcccacagaagtcatcggaccttaccaaagtaggttggagaattagattgccttttcatgcagtgagattcagttaagcaaaaatgaaatttgtctctatagctaattagcttatcaactcccctccaaacaaacaattaaaaaaaaaacatacagacactcaaattccacaagctaatgaacaaaagggactcttgtgagaagactaatgagtccctcatccagaagatgccaatgtactggcagattaacatacaacctatgttttgaacaaaaacaaccagcgatacgtaatcaaaatgtaattttcccctaataaaattatggatatgggcagtcatcaatggctgccaaaaccattaagtggaaagctgattaaaaaacaaaaatttctaatggatttatcaaactgtcccaaatcctgataaatattaacatcacagaggaagaccagacattatgggcctggaagtactataggagtgcacacatcacccgtgacatggtcttgccaaataattaaacctgaatttgatcaggtctctggatcttatttgcaattcaaaagaaattttaaaaaaatcctactaacaccaccacaaatatgcaatcagcaatatccagaaaggggaaattcacaggacaaaaacctggttttcttttttggtttcttcaaccaaaaaagaaagaaattgcaaaggaccaaaaaaatgttggggaatctatacattataagggacttaacaactaaagggcaacatatagactttagatcctaatttgagcaaaatctaaaatcaattattaggcaatcagaaaaatttgaacacagactagatatttgaggatattaaggtactatattattgaagattccatggttatgttttttaaagagttcatgccttttagagatacatactaaagtatttgtaaataaatgacatgatctagaaaaaaaaaaaaaaaa

SEQ ID NO: 154 - protein, 630 aa, Homo sapien
MGTYSTILIKTEVIECGNYCGVRIIHSLIAEFSLEELKKSYHLNKSQIMLDMLTENLFFDTGMGKSKFLQDMHTLLLTRHRDEHEGETGNWFSPFIEALHKDEGNEAVEAVLLESIHRFNPNAFICQALARHFYIKKKDFGNALNWAKQAKIIEPDNSYISDTLGQVYKSKIRWWIEENGGNGNISVDDLIALLDLAEHASSAFKESQQQSEDREYEVKERLYPKSKRRYDTYNIAGYQGEIEVGLYTIQILQLIPFFDNKNELSKRYMVNFVSGSSDIPGDPNNEYKLALKNYIPYLTKLKFSLKKSFDFFDEYFVLLKPRNNIKQNEEAKTRRKVAGYFKKYVDIFCLLEESQNNTGLGSKFSEPLQVERCRRNLVALKADKFSGLLEYLIKSQEDAISTMKCIVNEYTFLLEQCTVKIQSKEKLNFILANIILSCIQPTSRLVKPVEKLKDQLREVLQPIGLTYQFSEPYFLASLLFWPENQQLDQHSEQMKEYAQALKNSFKGQYKHMHRTKQPIAYFFLGKGKRLERLVHKGKIDQCFKKTPDINSLWQSGDVWKEEKVQELLLRLQGRAENNCLYIEYGINEKITIPITPAFLGQLRSGRSIEKVSFYLGFPIGGPLAYDIEIV

SEQ ID NO: 155 - DNA, 1656 bp, Mus musculus
cgcccctgctctcgcgccggcgtcggctgcgtctccggcgtttgaattgcgcttccgccatctttccagcctcagtcggacgggcgcggaggcgcttctggaaggaacgccgcgatggctgcgcagggagagccccaggtccagttcaaacttgtattggttggtgatggtggtactggaaaaacgaccttcgtgaaacgtcatttgactggtgaatttgagaagaagtatgtagccaccttgggtgttgaggttcatcccctagtgttccacaccaacagaggacctattaagttcaatgtatgggacacagccggccaggagaaattcggtggactgagagatggctattatatccaagcccagtgtgccatcataatgtttgatgtaacatcgagagttacttacaagaatgtgcctaactggcatagagatctggtacgagtgtgtgaaaacatccccattgtgttgtgtggcaacaaagtggatattaaggacaggaaagtgaaggcgaaatccattgtcttccaccgaaagaagaatcttcagtactacgacatttctgccaaaagtaactacaactttgaaaagcccttcctctggcttgctaggaagctcattggagaccctaacttggaatttgttgccatgcctgctctcgccccaccagaagttgtcatggacccagctttggcagcacagtatgagcacgacttagaggttgctcagacaactgctctcccggatgaggatgatgacctgtgagaatgaagctggagcccagcgtcagaagtctagttttataggcagctgtcctgtgatgtcagcggtgcagcgtgtgtgccacctcattattatctagctaagcggaacatgtgctttatctgtgggatgctgaaggagatgagtgggcttcggagtgaatgtggcagtttaaaaaataacttcattgtttggacctgcatatttagctgtttggacgcagttgattccttgagtttcatatataagactgctgcagtcacatcacaatattcagtggtgaaatcttgtttgttactgtcattcccattccttttctttagaatcagaataaagttgtatttcaaatatctaagcaagtgaactcatcccttgtttataaatagcatttggaaaccactaaagtagggaagttttatgccatgttaatatttgaattgccttgcttttatcacttaatttgaaatctattgggttaatttctccctatgtttatttttgtacatttgagccatgtcacacaaactgatgatgacaggtcagcagtattctatttggttagaagggttacatggtgtaaatattagtgcagttaagctaaagcagtgtttgctccaccttcatattggctaggtagggtcacctagggaagcacttgctcaaaatctgtgacctgtcagaataaaaatgtggtttgtacatatcaaatagatattttaagggtaatattttcttttatggcaaaagtaatcatgttttaatgtagaacctcaaacaggatggaacatcagtggatggcaggaggttgggaattcttgctgttaaaaataattacaaattttgcactttttgtttgaatgttagatgcttagtgtgaagttgatacgcaagccg

SEQ ID NO: 156 - protein, 216 aa, Mus musculus
MAAQGEPQVQFKLVLVGDGGTGKTTFVKRHLTGEFEKKYVATLGVEVHPLVFHTNRGPIKFNVWDTAGQEKFGGLRDGYYIQAQCAIIMFDVTSRVTYKNVPNWHRDLVRVCENIPIVLCGNKVDIKDRKVKAKSIVFHRKKNLQYYDISAKSNYNFEKPFLWLARKLIGDPNLEFVAMPALAPPEVVMDPALAAQYEHDLEVAQTTALPDEDDDL

SEQ ID NO: 157 - DNA, 188 bp, Homo sapien
ttaattttcttttaatgttttgtaaccttacatgtgattaaagtgttgtccagactttttattttggaccagtctctcgtggaagttgcacaaatagcttggagggttcctgtgtatcttttgccagctctccccagtgatggtgtcttacataaccacagcctgggtgacagagtgagccccatctc

SEQ ID NO: 158 - protein, 8 aa, Homo sapien
MFCNLTCD

SEQ ID NO: 159 - DNA, 2355 bp, Homo sapien
gcagaggaggcggcggaacaccccgggttggtcgggtttccaagggctgacccgagctccagcactttttccgcgcctgatttttcagagctcttcagaaaccaggctgctttcaggaacattgctgtggattcccagggcctattccactagaagcaagatggctgaactcaatactcatgtgaatgtcaaggaaaagatctatgcagttagatcagttgttcccaacaaaagcaataatgaaatagtcctggtgctccaacagtttgattttaatgtggataaagccgtgcaagcctttgtggatggcagtgcaattcaagttctaaaagaatggaatatgacaggaaaaaagaagaacaataaaagaaaaagaagcaagtccaagcagcatcaaggcaacaaagatgctaaagacaaggtggagaggcctgaggcagggcccctgcagccgcagccaccacagattcaaaacggccccatgaatggctgcgagaaggacagctcgtccacagattctgctaacgaaaaaccagcccttatccctcgtgagaaaaagatctcgatacttgaggaaccttcaaaggcacttcgtggggtcacagaaggcaacagactactgcaacagaaactatccttagatgggaaccccaaacctatacatggaacaacagagaggtcagatggcctacagtggtcagctgagcagccttgtaacccaagcaagcctaaggcaaaaacatctcctgttaagtccaatacccctgcagctcatcttgaaataaagccagatgagttggcaaagaaaagaggcccaaatattgagaaatcagtgaaggatttgcaacgctgcaccgtttctctaactagatatcgcgtcatgattaaggaagaagtggatagttccgtgaagaagatcaaagctgcctttgctgaattacacaactgcatcattgacaaagaagtttcattaatggcagaaatggataaagttaaagaagaagccatggaaatcctgactgctcgtcagaagaaagcagaagaactaaagagactcactaaccttgccagtcagatggcagagatgcagctggccgaactcagggcagaaattaagcactttgtcagcgagcgtaaatatgacgaggagctcgggaaagctgcccggttttcctgtgacatcgaacagctgaaggcccaaatcatgctctgcggagaaattacacatccaaagaacaactattcctcaagaactccctgcagctccctgctgcctctgctgaatgcgcacgcagcaacctctgggaaacagagtaacttttcccgaaaatcatccactcacaataagccctctgaaggcaaagcggcaaaccccaaaatggtgagcagtctccccagcaccgccgacccctctcaccagaccatgccggccaacaagcagaatggatcttctaaccaaagacggagatttaatccacagtatcataacaacaggctaaatgggcctgccaagtcgcagggcagtgggaatgaagccgagccactgggaaagggcaacagccgccacgaacacagaagacagccgcacaacggcttccggcccaaaaacaaaggcggtgccaaaaatcaagaggcttccttggggatgaagacccccgaggccccggcccattctgaaaagccccggcgaaggcagcacgctgcagacacctcggaggccaggcccttccggggtagtgtcggtagggtttcacagtgcaatctctgccccacgagaatagaagtttccacagatgcagcagttctctcagtcccggctgtgacgttggtggcctgagctaggaggaaaaagagcagttttcactcagttttggttccctgcccgaggtgctgacccaattcgctgccaaaagagtgtcaatcagaatatacaaatcccgtatggttgtgtcatcctctcttaatcatttttactaattctaataatcagctctagcttgcttcataattttcatggctttgcttgatctgttgatgctttctctcatcaagactttgcagcattttagccaggcagtatttactcattattaggaaaatcaagatgtggctgaagatcagaggctcagttagcaacctgtgttgtagcagtgatgtcagtccatagattgtctttagagagttaatgttacaaaaaagaattcttaataatcagacaaacatgatctgctgaggacacatgcgcttttgtagaatttaacatctggtgtttttctgaaaaaatatatatacatatattgctttatttgaaacaaattaaaatatgctgcatttgaaaaaaaaaaaaaaaaaaaa

SEQ ID NO: 160 - protein, 558 aa, Homo sapien
MAELNTHVNVKEKIYAVRSVVPNKSNNEIVLVLQQFDFNVDKAVQAFVDGSAIQVLKEWNMTGKKKNNKRKRSKSKQHQGNKDAKDKVERPEAGPLQPQPPQIQNGPMNGCEKDSSSTDSANEKPALIPREKKISILEEPSKALRGVTEGNRLLQQKLSLDGNPKPIHGTTERSDGLQWSAEQPCNPSKPKAKTSPVKSNTPAAHLEIKPDELAKKRGPNIEKSVKDLQRCTVSLTRYRVMIKEEVDSSVKKIKAAFAELHNCIIDKEVSLMAEMDKVKEEAMEILTARQKKAEELKRLTNLASQMAEMQLAELRAEIKHFVSERKYDEELGKAARFSCDIEQLKAQIMLCGEITHPKNNYSSRTPCSSLLPLLNAHAATSGKQSNFSRKSSTHNKPSEGKAANPKMVSSLPSTADPSHQTMPANKQNGSSNQRRRFNPQYHNNRLNGPAKSQGSGNEAEPLGKGNSRHEHRRQPHNGFRPKNKGGAKNQEASLGMKTPEAPAHSEKPRRRQHAADTSEARPFRGSVGRVSQCNLCPTRIEVSTDAAVLSVPAVTLVA

SEQ ID NO: 161 - DNA, 828 bp, Homo sapien
gggggagtgaaagcgaaagcccgggcgactagccgggagaccagagatctagcgactgaagcagcatggccaagccgtgtggggtgcgcctgagcggggaagcccgcaaacaggtggaggtcttcaggcagaatcttttccaggaggctgaggaattcctctacagattcttgccacagaaaatcatatacctgaatcagctcttgcaagaggactccctcaatgtggctgacttgacttccctccgggccccactggacatccccatcccagaccctccacccaaggatgatgagatggaaacagataagcaggagaagaaagaagtccctaagtgtggatttctccctgggaatgagaaagtcctgtccctgcttgccctggttaagccagaagtctggactctcaaagagaaatgcattctggtgattacatggatccaacacctgatccccaagattgaagatggaaatgattttggggtagcaatccaggagaaggtgctggagagggtgaatgccgtcaagaccaaagtggaagctttccagacaaccatttccaagtacttctcagaacgtggggatgctgtggccaaggcctccaaggagactcatgtaatggattaccgggccttggtgcatgagcgagatgaggcagcctatggggagctcagggccatggtgctggacctgagggccttctatgctgagctttatcatatcatcagcagcaacctggagaaaattgtcaccccaaagggtgaagaaaagccatctatgtactgaacccgggactagaaggaaaataaatgatctatatgttgtgtgg

SEQ ID NO: 162 - protein, 239 aa, Homo sapien [sequence omitted]

SEQ ID NO: 163 - DNA, 2202 bp, Homo sapien
cacgcttgccgccgccccgcagaaatgcttcggttacccacagtctttcgccagatgagaccggtgtccagggtactggctcctcatctcactcgggcttatgccaaagatgtaaaatttggtgcagatgcccgagccttaatgcttcaaggtgtagaccttttagccgatgctgtggccgttacaatggggccaaagggaagaacagtgattattgagcagggttggggaagtcccaaagtaacaaaagatggtgtgactgttgcaaagtcaattgacttaaaagataaatacaagaacattggagctaaacttgttcaagatgttgccaataacacaaatgaagaagctggggatggcactaccactgctactgtactggcacgctctatagccaaggaaggcttcgagaagattagcaaaggtgctaatccagtggaaatcaggagaggtgtgatgttagctgttgatgctgtaattgctgaacttaaaaagcagtctaaacctgtgaccacccctgaagaaattgcacaggttgctacgatttctgcaaacggagacaaagaaattggcaatatcatctctgatgcaatgaaaaaagttggaagaaagggtgtcatcacagtaaaggatggaaaaacactgaatgatgaattagaaattattgaaggcatgaagtttgatcgaggctatatttctccatactttattaatacatcaaaaggtcagaaatgtgaattccaggatgcctatgttctgttgagtgaaaagaaaatttctagtatccagtccattgtacctgctcttgaaattgccaatgctcaccgtaagcctttggtcataatcgctgaagatgttgatggagaagctctaagtacactcgtcttgaataggctaaaggttggtcttcaggttgtggcagtcaaggctccagggtttggtgacaatagaaagaaccagcttaaagatatggctattgctactggtggtgcagtgtttggagaagagggattgaccctgaatcttgaagacgttcagcctcatgacttaggaaaagttggagaggtcattgtgaccaaagacgatgccatgctcttaaaaggaaaaggtgacaaggctcaaattgaaaaacgtattcaagaaatcattgagcagttagatgtcacaactagtgaatatgaaaaggaaaaactgaatgaacggcttgcaaaactttcagatggagtggctgtgctgaaggttggtgggacaagtgatgttgaagtgaatgaaaagaaagacagagttacagatgcccttaatgctacaagagctgctgttgaagaaggcattgttttgggagggggttgtgccctccttcgatgcattccagccttggactcattgactccagctaatgaagatcaaaaaattggtatagaaattattaaaagaacactcaaaattccagcaatgaccattgctaagaatgcaggtgttgaaggatctttgatagttgagaaaattatgcaaagttcctcagaagttggttatgatgctatggctggagattttgtgaatatggtggaaaaaggaatcattgacccaacaaaggttgtgagaactgctttattggatgctgctggtgtggcctctctgttaactacagcagaagttgtagtcacagaaattcctaaagaagagaaggaccctggaatgggtgcaatgggtggaatgggaggtggtatgggaggtggcatgttctaactcctagactagtgctttacctttattaatgaactgtgacaggaagcccaaggcagtgttcctcaccaataacttcagagaagtcagttggagaaaatgaagaaaaaggctggctgaaaatcactataaccatcagttactggtttcagttgacaaaatatataatggtttactgctgtcattgtccatgcctacagataatttattttgtatttttgaataaaaaacatttgtacattcctgatactgggtacaagagccatgtaccagtgtactgctttcaacttaaatcactgaggcatttttactactattctgttaaaatcaggattttagtgcttgccaccaccagatgagaagttaagcagcctttctgtggagagtgagaataattgtgtacaaagtagagaagtatccaattatgtgacaacctttgtgtaataaaaatttgtttaa

SEQ ID NO: 164 - protein, 573 aa, Homo sapien
MLRLPTVFRQMRPVSRVLAPHLTRAYAKDVKFGADARALMLQGVDLLADAVAVTMGPKGRTVIIEQGWGSPKVTKDGVTVAKSIDLKDKYKNIGAKLVQDVANNTNEEAGDGTTTATVLARSIAKEGFEKISKGANPVEIRRGVMLAVDAVIAELKKQSKPVTTPEEIAQVATISANGDKEIGNIISDAMKKVGRKGVITVKDGKTLNDELEIIEGMKFDRGYISPYFINTSKGQKCEFQDAYVLLSEKKISSIQSIVPALEIANAHRKPLVIIAEDVDGEALSTLVLNRLKVGLQVVAVKAPGFGDNRKNQLKDMAIATGGAVFGEEGLTLNLEDVQPHDLGKVGEVIVTKDDAMLLKGKGDKAQIEKRIQEIIEQLDVTTSEYEKEKLNERLAKLSDGVAVLKVGGTSDVEVNEKKDRVTDALNATRAAVEEGIVLGGGCALLRCIPALDSLTPANEDQKIGIEIIKRTLKIPAMTIAKNAGVEGSLIVEKIMQSSSEVGYDAMAGDFVNMVEKGIIDPTKVVRTALLDAAGVASLLTTAEVVVTEIPKEEKDPGMGAMGGMGGGMGGGMF

SEQ ID NO: 165 - DNA, 1940 bp, Homo sapien
tacatggcgagcaaaaaaacaacgctgagagaatcttttctctaatgccagagaaaaatgaacattcctattgcacaatgatccgaggaatggtgaagctgatgtatacacatttaatgcattgattgaagcaacagtatgtgcgataaatgagaaatttgaggaaaaatggagtaaaatactggagctgctaagacacatggttgcacagaaggtgaaaccaaatcttcagacttttaataccattctgaaatgtctccgaagatttcatgtgtttgcaagatcgccagccttacaggttttacgtgaaatgaaagccattggaatagaaccctcgcttgcaacatatcaccatattattcgcctgtttgatcaacctggagaccctttaaagagatcatccttcatcatttatgatataatgaatgaattaatgggaaagagattttctccaaaggacccggatgatggcatataagttttttcagtcagccatgagcatatgctcatctctcagagatctagaacttgcctaccaagtacatggccttttaaaaaccggagacaactggaaattcattggacctgatcaacatcgtaatttctattattccaagttcttcgatttgatttgtctaatggaacaaattgatgttaccttgaagtggtatgaggacctgataccttcagcctactttccccactcccaaacaatgatacatcttctccaagcattggatgtggccaatcggctagaagtgattcctaaaatttggaaagatagtaaagaatatggtcatactttccgcagtgacctgagagaagagatcctgatgctcatggcaagggacaagcacccaccagagcttcaggtggcatttgctgactgtgctgctgatatcaaatctgcgtatgaaagccaacccatcagacagactgctcaggattggccagccacctctctcaactgtatagctatcctctttttaagggctgggagaactcaggaagcctggaaaatgttggggcttttcaggaagcataataagattcctagaagtgagttgctgaatgagcttatggacagtgcaaaagtgtctaacagcccttcccaggccattgaagtagtagagctggcaagtgccttcagcttacctatttgtgagggcctcacccagagagtaatgagtgattttgcaatcaaccaggaacaaaaggaagccctaagtaatctaactgcattgaccagtgacagtgatactgacagcagcagtgacagcgacagtgacaccagtgaaggcaaatgaaagtggagattcaggagcagcaatggtctcaccatagctgctggaatcacacctgagaactgagatataccaatatttaacattgttacaaagaagaaaagatacagatttggtgaatttgttactgtgaggtacagtcagtacacagctgacttatgtagatttaagctgctaatatgctacttaaccatctattaatgcaccattaaaggcttagcatttaagtagcaacattgcggttttcagacacatggtgaggtccatggctcttgtcatcaggataagcctgcacacctagagtgtcggtgagctgacctcacgatgctgtcctcgtgcgattgccctctcctgctgctggacttctgcctttgttggcctgatgtgctgctgtgatgctggtccttcatcttaggtgttcatgcagttctaacacagttggggttgggtcaatagtttcccaatttcaggatatttcgatgtcagaaataacgcatcttaggaatgactaaacaagataatggcagtttaggctgcacaactggtaaaatgactgtagataaatgttgtaattagtgtacacgtttgtatttttgttaatatagccgctgccatagttttctaacttgaacagcc

SEQ ID NO: 166 - protein, 280 aa, Homo sapien
MMAYKFFQSAMSICSSLRDLELAYQVHGLLKTGDNWKFIGPDQHRNFYYSKFFDLICLMEQIDVTLKWYEDLIPSAYFPHSQTMIHLLQALDVANRLEVIPKIWKDSKEYGHTFRSDLREEILMLMARDKHPPELQVAFADCAADIKSAYESQPIRQTAQDWPATSLNCIAILFLRAGRTQEAWKMLGLFRKHNKIPRSELLNELMDSAKVSNSPSQAIEVVELASAFSLPICEGLTQRVMSDFAINQEQKEALSNLTALTSDSDTDSSSDSDSDTSEGK

SEQ ID NO: 167 - DNA, 885 bp, Homo sapien
atggaagattcgatggacatggacatgagccccctgaggccccagaactatcttttcggttgtgaactaaaggccgacaaagattatcactttaaggtggataatgatgaaaatgagcaccagttatctttaagaacggtcagtttaggggctggtgcaaaggatgagttgcacattgttgaagcagaggcaatgaattacgaaggcagtccaattaaagtaacactggcaactttgaaaatgtctgtacagccaacggtttcccttgggggctttgaaataacaccaccagtggtcttaaggttgaagtgtggttcagggccagtgcatattagtggacagcacttagtagctgtggaggaagatgcagagtcagaagatgaagaggaggaggatgtgaaactcttaagtatatctggaaagcggtctgcccctggaggtggtagcaaggttccacagaaaaaagtaaaacttgctgctgatgaagatgatgacgatgatgatgaagaggatgatgatgaagatgatgatgatgatgattttgatgatgaggaagctgaagaaaaagcgccagtgaagaaatctatacgagatactccagccaaaaatgcacaaaagtcaaatcagaatggaaaagactcaaaaccatcatcaacaccaagatcaaaaggacaagaatccttcaagaaacaggaaaaaactcctaaaacaccaaaaggacctagttctgtagaagacattaaagcaaaaatgcaagcaagtatagaaaaaggtggttctcttcccaaagtggaagccaaattcatcaattatgtgaagaattgcttccggatgactgaccaagaggctattcaagatctctggcagtggaggaagtctctttaa

SEQ ID NO: 168 - protein, 294 aa, Homo sapien
MEDSMDMDMSPLRPQNYLFGCELKADKDYHFKVDNDENEHQLSLRTVSLGAGAKDELHIVEAEAMNYEGSPIKVTLATLKMSVQPTVSLGGFEITPPVVLRLKCGSGPVHISGQHLVAVEEDAESEDEEEEDVKLLSISGKRSAPGGGSKVPQKKVKLAADEDDDDDDEEDDDEDDDDDDFDDEEAEEKAPVKKSIRDTPAKNAQKSNQNGKDSKPSSTPRSKGQESFKKQEKTPKTPKGPSSVEDIKAKMQASIEKGGSLPKVEAKFINYVKNCFRMTDQEAIQDLWQWRKSL

SEQ ID NO: 169 - DNA, 2968 bp, Homo sapien
aatgacaggttgctcagagactgctgatttccatccctatataaagagagtccctggcatacagggactgctctgctccaggcatctgccacaatgtgggtgcttacacctgctgcttttgctgggaagctcttgagtgtgttcaggcaacctctgagctctctgtggaggagcctggtcccgctgttctgctggctgagggcaaccttctggctgctagctaccaagaggagaaagcagcagctggtcctgagagggccagatgagaccaaagaggaggaagaggaccctcctctgcccaccaccccaaccagcgtcaactatcacttcactcgccagtgcaactacaaatgcggcttctgtttccacacagccaaaacatcctttgtgctgccccttgaggaagcaaagagaggattgcttttgcttaaggaagctggtatggagaagatcaacttttcaggtggagagccatttcttcaagaccggggagaatacctgggcaagttggtgaggttctgcaaagtagagttgcggctgcccagcgtgagcatcgtgagcaatggaagcctgatccgggagaggtggttccagaattatggtgagtatttggacattctcgctatctcctgtgacagctttgacgaggaagtcaatgtccttattggccgtggccaaggaaagaagaaccatgtggaaaaccttcaaaagctgaggaggtggtgtagggattatagagtcgctttcaagataaattctgtcattaatcgtttcaacgtggaagaggacatgacggaacagatcaaagcactaaaccctgtccgctggaaagtgttccagtgcctcttaattgagggtgagaattgtggagaagatgctctaagagaagcagaaagatttgttattggtgatgaagaatttgaaagattcttggagcgccacaaagaagtgtcctgcttggtgcctgaatctaaccagaagatgaaagactcctaccttattctggatgaatatatgcgctttctgaactgtagaaagggacggaaggacccttccaagtccatcctggatgttggtgtagaagaagctataaaattcagtggatttgatgaaaagatgtttctgaagcgaggaggaaaatacatatggagtaaggctgatctgaagctggattggtagagcggaaagtggaacgagacttcaacacaccagtgggaaaactcctagagtaactgccattgtctgcaatactatcccgttggtatttcccagtggctgaaaacctgattttctgctgcacgtggcatctgattacctgtggtcactgaacacacgaataacttggatagcaaatcctgagacaatggaaaaccattaactttacttcattggcttataaccttgttgttattgaaacagcacttctgtttttgagtttgttttagctaaaaagaaggaatacacacaggaataatgaccccaaaaatgcttagataaggcccctatacacaggacctgacatttagctcaatgatgcgtttgtaagaaataagctctagtgatatctgtgggggcaatatttaatttggatttgattttttaaaacaatgtttactgcgatttctatatttccattttgaaactatttcttgttccaggtttgttcatttgacagagtcagtattttttgccaaatatccagataaccagttttcacatctgagacattacaaagtatctgcctcaattatttctgctggttataatgctttttttttttttgcctttatgccattgcagtcttgtactttttactgtgatgtacagaaatagtcaacagatgtttccaagaacatatgatatgataatcctaccaattttcaagaagtctctagaaagagataacacatggaaagacggtgtggtgcagcccagcccacggtggctgttccatgaatgctggctacctatgtgtgtggtacctgttgtgtccctttctcttcaaagatcctgagcaaaacaaagatacgctttccatttgatgatggagttgacatggaggcagtgcttgcattgctttgttcgcctatcatctggccacatgaggctgtcaagcaaaagaataggagtgtagttgagtagctggttggccctacatctctgagaagtgacgttacactgggttggcataagatatcctaaaatcacgctggaaccttgggcaaggaagaatgtgagcaagagtagagagagtgcctggatttcatgtcagtgaagccatgtcaccatatcatatttttgaatgaactctgagtcagttgaaatagggtaccatctaggtcagtttaagaagagtcagctcagagaaagcaagcataagggaaaatgtcacgtaaactagatcagggaacaaaatcctctccttgtggaaatatcccatgcagtttgttgatacaacttagtatcttattgcctaaaaaaaaatttcttatcattgtttcaaaaaagcaaaatcatggaaaatttttgttgtccaggcaaataaaaggtcattttaatttagctgcaatttcagtgttcctcactaggtggcatttaaatgtcgcctgatgtcattaagcaccatccaaaaagtctgcttcataatctattttcaagacttggtgattctgaaagttttggtttttgtgactttgtttctcaggaaaaaaaatattcctacttaaattttaagtctataattcaatttaaatatgtgtgtgtctcatccaggataggataggttgtcttctattttccattttacctatttactttttttgtaagaaaagagaaaaatgaattctaaagatgttccccatgggttttgattgtgtctaagctatgatgaccttcatataatcagcataaacataaaacaaattttttacttaacatgagtgcactttactaatcctcatggcacagt

SEQ ID NO: 170 - protein, 361 aa, Homo sapien
MWVLTPAAFAGKLLSVFRQPLSSLWRSLVPLFCWLRATFWLLATKRRKQQLVLRGPDETKEEEEDPPLPTTPTSVNYHFTRQCNYKCGFCFHTAKTSFVLPLEEAKRGLLLLKEAGMEKINFSGGEPFLQDRGEYLGKLVRFCKVELRLPSVSIVSNGSLIRERWFQNYGEYLDILAISCDSFDEEVNVLIGRGQGKKNHVENLQKLRRWCRDYRVAFKINSVINRFNVEEDMTEQIKALNPVRWKVFQCLLIEGENCGEDALREAERFVIGDEEFERFLERHKEVSCLVPESNQKMKDSYLILDEYMRFLNCRKGRKDPSKSILDVGVEEAIKFSGFDEKMFLKRGGKYIWSKADLKLDW

SEQ ID NO: 171 - DNA, 1879 bp, Homo sapien
ctgaggcccacgcagggcctagggtgggaagatggcaggtgggggcggcgacctgagcaccaggaggctgaatgaatgtatttcaccagtagcaaatgagatgaaccatcttcctgcacacagccacgatttgcaaaggatgttcacggaagaccagggtgtagatgacaggctgctctatgacattgtattcaagcacttcaaaagaaataaggtggagatttcaaatgcaataaaaaagacatttccattcctcgagggcctccgtgatcgtgatctcatcacaaataaaatgtttgaagattctcaagattcttgtagaaacctggtccctgtacagagagtggtgtacaatgttcttagtgaactggagaagacatttaacctgccagttctggaagcactgttcagcgatgtcaacatgcaggaataccccgatttaattcacatttataaaggctttgaaaatgtaatccatgacaaattgcctctccaagaaagtgaagaagaagagagggaggagaggtctggcctccaactaagtcttgaacaaggaactggtgaaaactcttttcgaagcctgacttggccaccttcgggttccccatctcatgctggtacaaccccacctgaaaatggactctcagagcacccctgtgaaacagaacagataaatgcaaagagaaaagatacaaccagtgacaaagatgattcgctaggaagccaacaaacaaatgaacaatgtgctcaaaaggctgagccaacagagtcctgcgaacaaattgctgtccaagtgaataatggggatgctggaagggagatgccctgcccgttgccctgtgatgaagaaagcccagaggcagagctacacaaccatggaatccaaattaattcctgttctgtgcgactggtggatataaaaaaggaaaagccattttctaattcaaaagttgagtgccaagcccaagcaagaactcatcataaccaggcatctgacataatagtcatcagcagtgaggactctgaaggatccactgacgttgatgagcccttagaagtcttcatctcagcaccgagaagtgagcctgtgatcaataatgacaaccctttagaatcaaatgatgaaaaggagggccaagaagccacttgctcacgaccccagattgtaccagagcccatggatttcagaaaattatctacattcagagaaagttttaagaaaagagtgataggacaagaccacgacttttcagaatccagtgaggaggaggcgcccgcagaagcctcaagcggggcactgagaagcaagcatggtgagaaggctcctatgacttctagaagtacatctacttggagaatacccagcaggaagagacgtttcagcagtagtgacttttcagacctgagtaatggagaagagcttcaggaaacctgcagctcatccctaagaagagggtcaggtaaagaagattaggatgccaagacttggcctgcagaatgtcaggaatgtgaattaaaagctgctgtttccagacgctttttattctgagcaccttcactaccttgtatccagttcatctgggaactcctttttgcattttagaaaatggaaagaggcaggaaattatgataaactcatgtttaacagaaagagtttcactgactaaatgtatgtaattatattttgttgttgtagaagaaataaatagcaaatttgtggtattcttttttttaaacctgctctcattcctattaacactaagatcttagatttttatagtgataaatgggttgacatcattgtcgtttgtaattgtaaagcctcaaaagacaactgttcctactatgtaattatagacagaaataaaaacttcagatc

SEQ ID NO: 172 - protein, 480 aa, Homo sapien
MAGGGGDLSTRRLNECISPVANEMNHLPAHSHDLQRMFTEDQGVDDRLLYDIVFKHFKRNKVEISNAIKKTFPFLEGLRDRDLITNKMFEDSQDSCRNLVPVQRVVYNVLSELEKTFNLPVLEALFSDVNMQEYPDLIHIYKGFENVIHDKLPLQESEEEEREERSGLQLSLEQGTGENSFRSLTWPPSGSPSHAGTTPPENGLSEHPCETEQINAKRKDTTSDKDDSLGSQQTNEQCAQKAEPTESCEQIAVQVNNGDAGREMPCPLPCDEESPEAELHNHGIQINSCSVRLVDIKKEKPFSNSKVECQAQARTHHNQASDIIVISSEDSEGSTDVDEPLEVFISAPRSEPVINNDNPLESNDEKEGQEATCSRPQIVPEPMDFRKLSTFRESFKKRVIGQDHDFSESSEEEAPAEASSGALRSKHGEKAPMTSRSTSTWRIPSRKRRFSSSDFSDLSNGEELQETCSSSLRRGSGKED

SEQ ID NO: 173 - DNA, 840 bp, Homo sapien
  unsure 228-250: unknown base
ggtcaggatctgggaaggtgacggatgagtagcctgatgaggctgaagctgccaccattcagcttttcagcagcagacactccaccccaaagcctgcagaagggattttgtgaagagggtcaccaggctgagcctcggccagaacccgtctacagaggaccctcagccagagcagaaagctcctgagccagctcccttggatggactcccagaggcctgagcccagannnnnnnnnnnnnnnnnnnnnnnactgcggtggatggagctggactccgaagaggccctgggaaccaggacagaggggcctagtgttgtccagggctgggggcacctgctccaggccgtgtggaggggccctgcaggcctggtgacgcagctgctgcggcaaggtgccagcgtggaggagaggacattgaggtgctgctgggccacggggcagacccaggcatcagggacaggcatggccgctctgcgctgcacagggctgccgcccgaggacacctgcttgccgtccagttgctggtcacccagggggccgaggtggatgcgcgggacaccctgggcctcacacccctgcatcacgcctctcgggaaggccacgtggaggttgccggctgcctgctggacagggtgtgcccaggtggatgctaccggctggctccgaaagacccccctacacctggctgcagagcgagggcatgggcctaccgtggggcttctgctgagccgaggggccagccccactctgcggacgcagtgggccgaggtggcccagatgcctgagggggacctgccccaggcgctgctgaacttggagggggggaaaggagtgtgagggc

SEQ ID NO: 174 - protein, 211 aa, Homo sapien
  unsure 10-17: unknown amino acid
MDSQRPEPRXXXXXXXXLRWMELDSEEALGTRTEGPSVVQGWGHLLQAVWRGPAGLVTQLLRQGASVEERTLRCCWATGQTQASGTGMAALRCTGLPPEDTCLPSSCWSPRGPRWMRGTPWASHPCITPLGKATWRLPAACWTGCAQVDATGWLRKTPLHLAAERGHGPTVGLLLSRGASPTLRTQWAEVAQMPEGDLPQALLNLEGGKGV

SEQ ID NO: 175 - DNA, 2229 bp, Homo sapien
ggcacgagggccaggaacgccagccgttcacgcgttcggtcctccttggctgactcaccgccctcgccgccgcaccatggacgcccccaggcaggtggtcaactttgggcctggtcccgccaagctgccgcactcagtgttgttagagatacaaaaggaattattagactacaaaggagttggcattagtgttcttgaaatgagtcacaggtcatcagattttgccaagattattaacaatacagagaatcttgtgcgggaattgctagctgttccagacaactataaggtgatttttctgcaaggaggtgggtgcggccagttcagtgctgtccccttaaacctcattggcttgaaagcaggaaggtgtgcggactatgtggtgacaggagcttggtcagctaaggccgcagaagaagccaagaagtttgggactataaatatcgttcaccctaaacttgggagttatacaaaaattccagatccaagcacctggaacctcaacccagatgcctcctacgtgtattattgcgcaaatgagacggtgcatggtgtggagtttgactttatacccgatgtcaagggagcagtactggtttgtgacatgtcctcaaacttcctgtccaagccagtggatgtttccaagtttggtgtgatttttgctggtgcccagaagaatgttggctctgctggggtcaccgtggtgattgtccgtgatgacctgctggggtttgccctccgagagtgcccctcggtcctggaatacaaggtgcaggctggaaacagctccttgtacaacacgcctccatgtttcagcatctacgtcatgggcttggttctggagtggattaaaaacaatggaggtgccgcggccatggagaagcttagctccatcaaatctcaaacaatttatgagattattgataattctcaaggattctacgtttgtccagtggagccccaaaatagaagcaagatgaatattccattccgcattggcaatgccaaaggagatgatgctttagaaaaaagatttcttgataaagctcttgaactcaatatgttgtccttgaaagggcataggtctgtgggaggcatccgggcctctctgtataatgctgtcacaattgaagacgttcagaagctggccgccttcatgaaaaaatttttggagatgcatcagctatgaacacatcctaaccaggatatactctgttcttgaacaacatacaaagtttaaagtaacttggggatggctacaaaaagttaacacagtatttttctcaaatgaacatgtttattgcagattcttcttttttgaaagaacaacagcaaaacatccacaactctgtaaagctggtgggacctaatgtcaccttaattctgacttgaactggaagcattttaagaaatcttgttgcttttctaacaaattcccgcgtattttgcctttgctgctactttttctagttagatttcaaacttgcctgtggacttaataatgcaagttgcgattaattatttctggagtcatgggaacacacagcacagagggtaggggggccctctaggtgctgaatctacacatctgtggggtctcctgggttcagcggctgttgattcaaggtcaacattgaccattggaggagtggtttaagagtgccaggcgaagggcaaactgtagatcgatctttatgctgttattacaggagaagtgacatactttatatatgtttatattagcaaggtctgtttttaataccatatactttatatttctatacatttatatttctaataatacagttatcactgatatatgtagacacttttagaatttattaaatccttgaccttgtgcattatagcattccattagcaagagttgtaccccctccccagtcttcgccttcctctttttaagctgttttatgaaaaagacctagaagttcttgattcatttttaccattctttccataggtagaagagaaagttgattggttggttgtttttcaattatgccattaaactaaacatttctgttaaattaccctatcctttgttctctactgttttctttgtaatgtatgactacgagagtgatactttgctgaaaagtctttcccctattgtttatctattgtcagtattttatgttgaatatgtaaagaacattaaagtcctaaaacatctaaaaaaaaaaaaaaaaaaaaaaaaaaaaaaaaaaa

SEQ ID NO: 176 - protein, 370 aa, Homo sapien
MDAPRQVVNFGPGPAKLPHSVLLEIQKELLDYKGVGISVLEMSHRSSDFAKIINNTENLVRELLAVPDNYKVIFLQGGGCGQFSAVPLNLIGLKAGRCADYVVTGAWSAKAAEEAKKFGTINIVHPKLGSYTKIPDPSTWNLNPDASYVYYCANETVHGVEFDFIPDVKGAVLVCDMSSNFLSKPVDVSKFGVIFAGAQKNVGSAGVTVVIVRDDLLGFALRECPSVLEYKVQAGNSSLYNTPPCFSIYVMGLVLEWIKNNGGAAAMEKLSSIKSQTIYEIIDNSQGFYVCPVEPQNRSKMNIPFRIGNAKGDDALEKRFLDKALELNMLSLKGHRSVGGIRASLYNAVTIEDVQKLAAFMKKFLEMHQL

SEQ ID NO: 177 - DNA, 840 bp, Homo sapien
ggcgtctgccaggagctacggccggaagatggcggcggccgcagagttgtcgctactggagaagtccctgggactgagtaaggggaataaatacagtgctcagggcgagcgacagattccagttcttcagacaaacaatggtccaagtctaacaggattgactactatagcagctcatctagtcaagcaagccaacaaagaatatttgctggggagtactgcagaagaaaaagcaatcgttcagcagtggttagaatacagggtcactcaagtagatgggcactccagtaaaaatgacatccacacactgttgaaggatcttaattcatatcttgaagataaagtctaccttacagggtataactttacattagcagatatactattgtactatggacttcatcgctttatagttgacctgacagttcaagaaaaggagaaatatcttaatgtgtctcgctggttttgtcacattcagcattatccaggcatcaggcaacatctgtctagtgttgtcttcatcaagaacagactatatactaattcccactagaagctgtccatgccatacagaagatctattaaaaatgttttaaatggaaaatgtactctagaccacaggactaatgtaaattaatatacagtcattcattatttgttgaagttgatagaatttttgaagtgtaaacttgtgtctgaatgttttatttgttctttagctgaagttttgcaatttttatgtcaaaattcaattgctattaaacaagttgagatccagttataaattaaccttgtttttagtagatgacatttatttcaataaaagttgcaaatcgggaa

SEQ ID NO: 178 - protein, 174 aa, Homo sapien
MAAAAELSLLEKSLGLSKGNKYSAQGERQIPVLQTNNGPSLTGLTTIAAHLVKQANKEYLLGSTAEEKAIVQQWLEYRVTQVDGHSSKNDIHTLLKDLNSYLEDKVYLTGYNFTLADILLYYGLHRFIVDLTVQEKEKYLNVSRWFCHIQHYPGIRQHLSSVVFIKNRLYTNSH

SEQ ID NO: 179 - DNA, 2156 bp, Homo sapien
ggcacgagcccagaaacaaagacttcacggacaaagtcccttggaaccagagagaagccgggatggaaactccaaacaccacagaggactatgacacgaccacagagtttgactatggggatgcaactccgtgccagaaggtgaacgagagggcctttggggcccaactgctgccccctctgtactccttggtatttgtcattggcctggttggaaacatcctggtggtcctggtccttgtgcaatacaagaggctaaaaaacatgaccagcatctacctcctgaacctggccatttctgacctgctcttcctgttcacgcttcccttctggatcgactacaagttgaaggatgactgggtttttggtgatgccatgtgtaagatcctctctgggttttattacacaggcttgtacagcgagatctttttcatcatcctgctgacgattgacaggtacctggccatcgtccacgccgtgtttgccttgcgggcacggaccgtcacttttggtgtcatcaccagcatcatcatttgggccctggccatcttggcttccatgccaggcttatacttttccaagacccaatgggaattcactcaccacacctgcagccttcactttcctcacgaaagcctacgagagtggaagctgtttcaggctctgaaactgaacctctttgggctggtattgcctttgttggtcatgatcatctgctacacagggattataaagattctgctaagacgaccaaatgagaagaaatccaaagctgtccgtttgatttttgtcatcatgatcatcttttttctcttttggaccccctacaatttgactatacttatttctgttttccaagacttcctgttcacccatgagtgtgagcagagcagacatttggacctggctgtgcaagtgacggaggtgatcgcctacacgcactgctgtgtcaacccagtgatctacgccttcgttggtgagaggttccggaagtacctgcggcagttgttccacaggcgtgtggctgtgcacctggttaaatggctccccttcctctccgtggacaggctggagagggtcagctccacatctccctccacaggggagcatgaactctctgctgggttctgactcagaccataggaggccaacccaaaataagcaggcgtgacctgccaggcacactgagccagcagcctggctctcccagccaggttctgactcttggcacagcatggagtcacagccacttgggatagagagggaatgtaatggtggcctggggcttctgaggcttctggggcttcagtcttttccatgaacttctcccctggtagaaagaagatgaatgagcaaaaccaaatattccagagactgggactaagtgtaccagagaagggcttggactcaagcaagatttcagatttgtgaccattagcatttgtcaacaaagtcacccacttcccactattgcttgcacaaaccaattaaacccagtagtggtgactgtgggctccattcaaagtgagctcctaagccatgggagacactgatgtatgaggaatttctgttcttccatcacctccccccccccgccaccctcccactgccaagaacttggaaatagtgatttccacagtgactccactctgagtcccagagccaatcagtagccagcatctgcctccccttcactcccaccgcaggatttgggctcttggaatcctggggaacatagaactcatgacggaagagttgagacctaacgagaaatagaaatgggggaactactgctggcagtggaactaagaaagcccttaggaagaatttttatatccactaaaatcaaacaattcagggagtgggctaagcacgggccatatgaataacatggtgtgcttcttaaaatagccataaaggggagggactcatcatttccatttacccttcttttctgactatttttcagaatctctcttcttttcaagttgggtgatatgttggtagattctaatggctttattgcagcgattaataacaggcaaaaggaagcagggttggtttcccttctttttgttcttcatctaagccttctggttttatgggtcagagttccgactgccatcttggacttgtcagcaaaaaaaaaaaaaaaaa

SEQ ID NO: 180 - protein, 355 aa, Homo sapien
METPNTTEDYDTTTEFDYGDATPCQKVNERAFGAQLLPPLYSLVFVIGLVGNILVVLVLVQYKRLKNMTSIYLLNLAISDLLFLFTLPFWIDYKLKDDWVFGDAMCKILSGFYYTGLYSEIFFIILLTIDRYLAIVHAVFALRARTVTFGVITSIIIWALAILASMPGLYFSKTQWEFTHHTCSLHFPHESLREWKLFQALKLNLFGLVLPLLVMIICYTGIIKILLRRPNEKKSKAVRLIFVIMIIFFLFWTPYNLTILISVFQDFLFTHECEQSRHLDLAVQVTEVIAYTHCCVNPVIYAFVGERFRKYLRQLFHRRVAVHLVKWLPFLSVDRLERVSSTSPSTGEHELSAGF

SEQ ID NO: 181 - DNA, 6480 bp, Homo sapien
agagcgagcaggggagagcgagaccagttttaaggggaggaccggtgcgagtgaggcagccccgaggctctgctcgcccaccacccaatcctcgcctcccttctgctccaccttctctctctgccctcacctctcccccgaaaaccccctatttagccaaaggaaggaggtcaggggaacgctctcccctccccttccaaaaaacaaaaacagaaaaacccttttccaggccggggaaagcaggagggagaggggccgccgggctggccatggagctgctgtgccacgaggtggacccggtccgcagggccgtgcgggaccgcaacctgctccgagacgaccgcgtcctgcagaacctgctcaccatcgaggagcgctaccttccgcagtgctcctacttcaagtgcgtgcagaaggacatccaaccctacatgcgcagaatggtggccacctggatgctggaggtctgtgaggaacagaagtgcgaagaagaggtcttccctctggccatgaattacctggaccgtttcttggctggggtcccgactccgaagtcccatctgcaactcctgggtgctgtctgcatgttcctggcctccaaactcaaagagaccagcccgctgaccgcggagaagctgtgcatttacaccgacaactccatcaagcctcaggagctgctggagtgggaactggtggtgctggggaagttgaagtggaacctggcagctgtcactcctcatgacttcattgagcacatcttgcgcaagctgccccagcagcgggagaagctgtctctgatccgcaagcatgctcagaccttcattgctctgtgtgccaccgactttaagtttgccatgtacccaccgtcgatgatcgcaactggaagtgtgggagcagccatctgtgggctccagcaggatgaggaagtgagctcgctcacttgtgatgccctgactgagctgctggctaagatcaccaacacagacgtggattgtctcaaagcttgccaggagcagattgaggcggtgctcctcaatagcctgcagcagtaccgtcaggaccaacgtgacggatccaagtcggaggatgaactggaccaagccagcacccctacagacgtgcgggatatcgacctgtgaggatgccagttgggccgaaagagagagacgcgtccataatctggtctcttcttctttctggttgtttttgttctttgtgttttagggtgaaacttaaaaaaaaaattctgcccccacctagatcatatttaaagatcttttagaagtgagagaaaaaggtcctacgaaaacggaataataaaaagcatttggtgcctatttgaagtacagcataagggaatcccttgtatatgcgaacagttattgtttgattatgtaaaagtaatagtaaaatgcttacaggaaaacctgcagagtagttagagaatatgtatgcctgcaatatgggaacaaattagaggagacttttttttttcatgttatgagctagcacatacacccccttgtagtataatttcaaggaactgtgtacgccatttatggcatgattagattgcaaagcaatgaactcaagaaggaattgaaataaggagggacatgatggggaaggagtacaaaacaatctctcaacatgattgaaccatttgggatggagaagcacctttgctctcagccacctgttactaagtcaggagtgtagttggatctctacattaatgtcctcttgctgtctacagtagctgctacctaaaaaaagatgttttattttgccagttggacacaggtgattggctcctgggtttcatgttctgtgacatcctgcttcttcttccaaatgcagttcattgcagacaccaccatattgctatctaatggggaaatgtagctatgggccataaccaaaactcacatgaaacggaggcagatggagaccaagggtgggatccagaatggagtcttttctgttattgtatttaaaagggtaatgtggccttggcatttcttcttagaaaaaaactaatttttggtgctgattggcatgtctggttcacagtttagcattgttataaaccattccattcgaaaagcactttgaaaaattgttcccgagcgatagatgggatggtttatgcaagtcatgctgaatactcctcccctcttctcttttgccccctcccttcctgcccccagtctgggttactcttcgcttctggtatctggcgttctttggtacacagttctggtgttcctaccaggactcaagagacaccccttcctgctgacattcccatcacaacattcctcagacaagcctgtaaactaaaatctgttaccattctgatggcacagaaggatcttaattcccatctctatacttctcctttggacatggaaagaaaagttattgctggtgcaaagatagatggctgaacatcagggtgtggcattttgttcccttttccgttttttttttttttattgttgttgttaattttattgcaaagttgtattcagcgtacttgaatttttcttcctctccacttcttagaggcattcagttagcaaagaggttggagcaacaacttttttttttttttttgcacaattgtaattgacaggtaatgaagctatttgttaaaatatttgcctttttaagtaaaaaagaaaaatcagaacagggctatttgaagaattattttatacacagattctgccttgtttcatagtatgagggttgaagacggaaaacaatctaagggtctctcatttttttaattttgttttgttcagtttggtttttttttttttttgcgctgctaagaagctaaagtcatccatccttattcacgttgacagtacctagctgtaatgtttcacagagtgtgctgctattttataaacatttttataatatattattttactgcttaaattccaagtcctgaagtagatggttgagatatgagttcttcgtactggaaaagcccttccgtagtttgttttcttctggtagcatattcatggttgtttttttttttcttttttggttttttggttttttttttttcctctgatcacattcttcaaagacggagtattctttacctcaggtttactggacaaaatcaataactacaaaaggcaatgattcacgcttttgttttcataatacctcacaaccgtacagtttctgcttgggagcccattcgcatgaggaatacagaagcagtgtgagcagggctgactccctctcaggtggaaggcagggcggtctcactcccagggacctttttggtcatggaggccatcgggctcccagttagaccctggtatcctcatcatgatggaaaaaatacattgaaccaagggatcctccctccccttcaaggcagacgttcagtacaaacatttatgcggtaggctcagatgtcgtaatttgcacttaggtaccaggtgtcaggaaacagactaaaaagaattccaccaggctgtttggagatcctcatcttggagctttttcaaaagcggggcttcatctgcaaagggccctttcatcttgaagtttttcccctccgtctttcccctcccctggcatggacaccttgtgtttaggatcatctctgcaggtttcctaggtctgaatctgcgagtagatgaacctgcagcaagcagcgtttatggtgcttccttctccctcctctgtctcaaactgcgcaggcaagcactatgcaagcccaggccctctgctgagcggtactaaacggtcgggttttcaatcacactgaattggcaggataagaaaaataggtcagataagtatgggatgatagttgaagggaggtgaagaggctgcttctctacagaggtgaaattccagatgagtcagtctcttgggaagtgtgtttagaagggttcaggactttgtgagttagcatgaccctaaaattctaggggatttctggtgggacaatgggtggtgaattttgaagttttggagagggaagtggagcagccagcaagtaagctagccagagttttctcaagagccagctttgctcagcacactctcctgggccccaaggagtcccacggaatggggaaagtgggaaccctggagttcttgggaatcttggagcctaaagagaaaccgaggtgcaaattcatttcatggtgactgacccttgagcttaaacagaagcagcaaatgaaagaaccggacaaataaggaagggcacaagcctacccgactctatttacagtctgtaactttccactcttcctgtagtcccgaggcccctgggtccttctagcttttctctttcccatccttggggccttgtgtgatgatgggtgtggggctgccgatgggaaagtcgggggttgttaggcttttctgcctgctcctgcttaaacacaagaaggaatcctggattttgccctctccttagctcttagtctctttggtaggagttttgttccagaggagctctcccccttggatttgaacttgctctttttgttgttgttgttctttctcttctttttcttacctcccactaaaggggttccaaattatcctggtctttttctaccttgttgtgtttctatctcgtctttacttccatctgtttgtttttttctccatcagtgggggccgagttgttcccccagcctgccaaattttgatccttcccctcttttggccaaatcctagggggaagaaatcctagtatgccaaaaatatatgctaagcataattaaactccatgcgggtccataacagccaagaagcctgcaggagaaagccaagggcagttccctccgcagaacaccccatgcgtgctgagaggcgagctccttgaagaaggggctgttcttccaggaggccttattttgaactgcctcaggaccccactggagagcacagcatgccttactactgggtcatccttggtctatgtgctctgtactggaggctctgttctgcctcttatcagccaggtcaggggcacacatggcttaagtgacaaagccagaggagaagacaaccctgacagcatcacgctgcatcccattgctagcaggattggcaactcttcagacggagctgcgcttccctgcagtctagcacctctagggcctctccagactgtgccctgggagctctgggactgaaaggttaagaacataaggcaggatcagatgactctctccaagagggcaggggaattttctctccatgggccacaggggacagggctgggagaagaaatagacttgcaccttatgtcatgtaaataattgattttctagttcaagaagataatattggtagtgtgggaattggaggtaggaaggggaggaagtctgagtaagccagttggcttctaagccaaaaggattcctctttgtttatctctgagacagtccaaccttgagaatagctttaaaagggaaattaatgctgagatgataaagtccccttaagccaacaaaccctctgtagctatagaatgagtgcaggtttctattggtgtggactcagagcaatttacaagagctgttcatgcagccatccatttgtgcaaaatagggtaagaagattcaagaggatatttattacttcctcataccacatggcttttgatgattctggattctaaacaacccagaatggtcatttcaggcacaacgatactacattcgtgtgtgtctgcttttaaacttggctgggctatcagaccctattctcggctcaggttttgagaagccatcagcaaatgtgtacgtgcatgctgtagctgcagcctgcatcccttcgcctgcagcctactttggggaaataaagtgccttactgactgtagccattacagtatccaatgtcttttgacaggtgcctgtccttgaaaaacaaagtttctatttttatttttaattggtttagttcttaactgctggccaactcttacatccccagcaaatcatcgggccattggattttttccattatgttcatcacccttatatcatgtacctcagatctctctctctctcctctctctcagttatatagtttcttgtcttggactttttttttcttttctttttctttttttttttgctttaaaacaagtgtgatgccatatcaagtccatgttattctctcacagtgtactctataagaggtgtgggtgtctgtttggtcaggatgttagaaagtgctgataagtagcatgatcagtgtatgcgaaaaggtttttaggaagtatggcaaaaatgttgtattggctatgatggtgacatgatatagtcagctgccttttaagaggtcttatctgttcagtgttaagtgatttaaaaaaataataacctgttttctgactagtttaaagatggatttgaaaatggttttgaatgcaattaggttatgctatttggacaataaactcaccttgacct

SEQ ID NO: 182 - protein, 289 aa, Homo sapien
MELLCHEVDPVRRAVRDRNLLRDDRVLQNLLTIEERYLPQCSYFKCVQKDIQPYMRRMVATWMLEVCEEQKCEEEVFPLAMNYLDRFLAGVPTPKSHLQLLGAVCMFLASKLKETSPLTAEKLCIYTDNSIKPQELLEWELVVLGKLKWNLAAVTPHDFIEHILRKLPQQREKLSLIRKHAQTFIALCATDFKFAMYPPSMIATGSVGAAICGLQQDEEVSSLTCDALTELLAKITNTDVDCLKACQEQIEAVLLNSLQQYRQDQRDGSKSEDELDQASTPTDVRDIDL

SEQ ID NO: 183 - DNA, 918 bp, Homo sapien
atggccgcgcttgcaccgctgcccccgctccccgcacagttcaagagcatacagcatcatctgaggacggctcaggagcatgacaagcgagaccctgtggtggcttattactgtcgtttatacgcaatgcagactggaatgaagatcgatagtaaaactcctgaatgtcgcaaatttttatcaaagttaatggatcagttagaagctctaaagaagcagttgggtgataatgaagctattactcaagaaatagtgggctgtgcccatttggagaattatgctttgaaaatgtttttgtatgcagacaatgaagatcgtgctggacgatttcacaaaaacatgatcaagtccttctatactgcaagtcttttgatagatgtcataacagtattggagaactcactgatgaaatgtgaacacaggaagtatgccagatggaaggcaacatacatccataatgttaagaatggggagactcctcaagcaggccctgttggaattgaagaagataatgatattgaagaaaatgaagatgctggagcagcctctctgcccactcagccaactcagccatcatcatcttcaacttatgacccaagcaacatgccatcaggcaactatactggaatacagattcctccgggtgcacacgctccagctaatacaccagcagaagtgcctcacagcacaggtgtagcaagtaatactatccaacctactccacagactatacctgccattgatcccgcacttttcaatacaatttcccagggggatgttcgtctaaccccagaagactttgctagagctcagaagtactgcaaatatgctggcagtgctttgcagtatgaagatgtaagcactgctgtccagaatctacaaaaggctctcaagttactgacgacaggcagagaatga

SEQ ID NO: 184 - protein, 305 aa, Homo sapien
MAALAPLPPLPAQFKSIQHHLRTAQEHDKRDPVVAYYCRLYAMQTGMKIDSKTPECRKFLSKLMDQLEALKKQLGDNEAITQEIVGCAHLENYALKMFLYADNEDRAGRFHKNMIKSFYTASLLIDVITVLENSLMKCEHRKYARWKATYIHNVKNGETPQAGPVGIEEDNDIEENEDAGAASLPTQPTQPSSSSTYDPSNMPSGNYTGIQIPPGAHAPANTPAEVPHSTGVASNTIQPTPQTIPAIDPALFNTISQGDVRLTPEDFARAQKYCKYAGSALQYEDVSTAVQNLQKALKLLTTGRE

SEQ ID NO: 185 - DNA, 2019 bp, Homo sapien
acgtgtatcgctgccgtcaagatggaggggcctttgtccgtgttcggtgaccgcagcactggggaaacgatccgctcccaaaacgttatggctgcagcttcgattgccaatattgtaaaaagttctcttggtccagttggcttggataaaatgttggtggatgatattggtgatgtaaccattactaacgatggtgcaaccatcctgaagttactggaggtagaacatcctgcagctaaagttctttgtgagctggctgatctgcaagacaaagaagttggagatggaactacttcagtggttattattgcagcagaactcctaaaaaatgcagatgaattagtcaaacagaaaattcatcccacatcagttattagtggctatcgacttgcttgcaaggaagcagtgcgttatatcaatgaaaacctaattgttaacacagatgaactgggaagagattgcctgattaatgctgctaagacatccatgtcttccaaaatcattgggataaatggtgatttctttgctaacatggtagtagatgctgtacttgctattaaatacacagacataagaggccagccacgctatccagtcaactctgttaatattttgaaagcccatgggagaagtcaaatggagagtatgctcatcagtggctatgcactcaactgtgtggtgggatcccagggcatgcccaagagaatcgtaaatgcaaaaattgcttgccttgacttcagcctgcaaaaaacaaaaatgaagcttggtgtacaggtggtcattacagaccctgaaaaactggaccaaattagacagagagaatcagatatcaccaaggagagaattcagaagatcctggcaactggtgccaatgttattctaaccactggtggaattgatgatatgtgtctgaagtattttgtggaggctggtgctatggcagttagaagagttttaaaaagggaccttaaacgcattgccaaagcttctggagcaactattctgtcaaccctggccaatttggaaggtgaagaaacttttgaagctgcaatgttgggacaggcagaagaagtggtacaggagagaatttgtgatgatgagctgatcttaatcaaaaatactaaggctcgtacgtctgcatcgattatcttacgtggggcaaatgatttcatgtgtgatgagatggagcgctctttacatgatgcactttgtgtagtgaagagagttttggagtcaaaatctgtggttcccggtgggggtgctgtagaagcagccctttccatataccttgaaaactatgcaaccagcatggggtctcgggaacagcttgcgattgcagagtttgcaagatcacttcttgttattcccaatacactagcagttaatgctgcccaggactccacagatctggttgcaaaattaagagcttttcataatgaggcccaggttaacccagaacgtaaaaatctaaaatggattggtcttgatttgagcaatggtaaacctcgagacaacaaacaagcaggggtgtttgaaccaaccatagttaaagttaagagtttgaaatttgcaacagaagctgcaatcaccattcttcgaattgatgatcttattaaattacatccagaaatccttcggattaaacatggaagttatgaagatgctgttcactctggagcccttaatgattgatctgatgttccttttatttataacaatgttaaatgcaatgtcttgtaccttgagttgagtattacacattaaagtaaagtacaagctgtaaacttgggtttttgtgatgtaggaaatggtttccatctgtactttggtcctctgatttcagatattgcaacctagtactttattagtttaaaaagaaattgaggttgttcaaagtttaagcaattcattctctctgaacacacattgctattcccatcccacccccaatgcacagggctgcaacaccacgacttctgcccattctctccagtgtgtgtaacagggtcacaagaattc

SEQ ID NO: 186 - protein, 556 aa, Homo sapien
MEGPLSVFGDRSTGETIRSQNVMAAASIANIVKSSLGPVGLDKMLVDDIGDVTITNDGATILKLLEVEHPAAKVLCELADLQDKEVGDGTTSVVIIAAELLKNADELVKQKIHPTSVISGYRLACKEAVRYINENLIVNTDELGRDCLINAAKTSMSSKIIGINGDFFANMVVDAVLAIKYTDIRGQPRYPVNSVNILKAHGRSQMESMLISGYALNCVVGSQGMPKRIVNAKIACLDFSLQKTKMKLGVQVVITDPEKLDQIRQRESDITKERIQKILATGANVILTTGGIDDMCLKYFVEAGAMAVRRVLKRDLKRIAKASGATILSTLANLEGEETFEAAMLGQAEEVVQERICDDELILIKNTKARTSASIILRGANDFMCDEMERSLHDALCVVKRVLESKSVVPGGGAVEAALSIYLENYATSMGSREQLAIAEFARSLLVIPNTLAVNAAQDSTDLVAKLRAFHNEAQVNPERKNLKWIGLDLSNGKPRDNKQAGVFEPTIVKVKSLKFATEAAITILRIDDLIKLHPEILRIKHGSYEDAVHSGALND

SEQ ID NO: 187 - DNA, 1302 bp, Homo sapien
gcttcgggtgccatggggactcctcccggcctgcagaccgactgcgaggcgctgctcagccgcttccaggagacggacagtgtacgcttcgaggacttcacggagctctggagaaacatgaagttcgggactatcttctgtggcagaatgagaaatttagaaaagaacatgtttacaaaagaagctttagctttggcttggcgatattttttacctccatacaccttccagatcagagttggtgctttgtatctgctatatggattatataatacccaactgtgtcaaccaaaacaaaagatcagagttgccctgaaggattgggatgaagttttaaaatttcagcaagatttagtaaatgcacagcattttgatgcagcttatatttttaggaagctacgactagacagagcatttcactttacagcaatgcccaaattgctgtcatataggatgaagaaaaaaattcaccgagctgaagttacagaagaatttaaggacccaagtgatcgtgtgatgaaacttatcacttctgatgtattagaggaaatgctgaatgttcatgatcattatcagaacatgaaacatgtaatttcagttgataagtccaagccagataaagccctcagcttgataaaggatgatttttttgacaatattaagaacatagttttggagcatcagcagtggcacaaagacagaaagaatccatccttaaagtcaaaaactaatgatggagaagaaaaaatggaaggaaattcacaagaaacggagagatgtgaaagggcagaatcattagcgaaaataaaatcaaaggccttttcagttgtcatacaggcatccaaatcaagaaggcatcgtcaagtcaaactcgactcttctgactctgattctgcatctggtcaagggcaagtcaaagcaactaggaaaaaagagaagaaagaaagattgaaaccagcaggaaggaagatgtctctcagaaacaaaggcaatgtgcagaatatacacaaggaagataaacctttaagtctgagtatgcctgtaattacagaagaagaagagaatgaaagtttgagtggaacagagttcactgcatccaagaagaggagaaaacactgaacaaagagcctggtgtagtttttaattttgagttttctgacagaagaaaagattgatattttgtgtattgaacaggaagactgccagtattaaaaaaatccttctgggaatctgtaggttatttcttggaaattgcaatacgtagttctagaataaaagtacaaaaaattagaataagaattc

SEQ ID NO: 188 - protein, 368 aa, Homo sapien
MGTPPGLQTDCEALLSRFQETDSVRFEDFTELWRNMKFGTIFCGRMRNLEKNMFTKEALALAWRYFLPPYTFQIRVGALYLLYGLYNTQLCQPKQKIRVALKDWDEVLKFQQDLVNAQHFDAAYIFRKLRLDRAFHFTAMPKLLSYRMKKKIHRAEVTEEFKDPSDRVMKLITSDVLEEMLNVHDHYQNMKHVISVDKSKPDKALSLIKDDFFDNIKNIVLEHQQWHKDRKNPSLKSKTNDGEEKMEGNSQETERCERAESLAKIKSKAFSVVIQASKSRRHRQVKLDSSDSDSASGQGQVKATRKKEKKERLKPAGRKMSLRNKGNVQNIHKEDKPLSLSMPVITEEEENESLSGTEFTASKKRRKH

SEQ ID NO: 189 - DNA, 3502 bp, Homo sapien
gcgcgcagctggttcccgctctgcagcgcaacgcctgaggcagtgggcgcgctcagtcccgggaccaggcgttctctcctctcgcctctgggcctgggacccgcaaagcggcgatggagcggaggtcgcggaggaagtcgcggcgcaacgggcgctcgaccgcgggcaaggccgccgcgacccagcccgcgaagtctccgggcgcacagctctggctctttcccagcgccgcgggcctccaccgcgcgctgctccggagggtggaggtgacgcgccaactctgctgctcgccggggcgcctcgcggtcttggaacgcggcggggcgggcgtccaggttcaccagctgctcgccgggagcggcggcgcccggacgccgaaatgcattaaattaggaaaaaacatgaagatacattccgtggaccaaggagcagagcacatgctgattctctcatcagatggaaaaccatttgagtatgacaactatagcatgaaacatctaaggtttgaaagcattttacaagaaaaaaaaataattcagatcacatgtggagattaccattctcttgcactctcaaaaggcggtgagctttttgcctggggacagaacctgcatgggcagcttggagttggaaggaaatttccctcaaccaccacaccacagattgtggagcacctcgcaggagtacccttggctcagatttctgccggagaagcccacagcatggccttatccatgtctggcaacatttattcatggggaaaaaatgaatgtggacaactaggcctgggccacactgagagtaaagatgatccatcccttattgaaggactagacaatcagaaagttgaatttgtcgcttgtggtggctctcacagtgccctactcacacaggatgggctgctgtttactttcggtgctggaaaacatgggcaacttggtcataattcaacacagaatgagctaagaccctgtttggtggctgagcttgttgggtatagagtgactcagatagcatgtggaaggtggcacacacttgcctatgtttctgatttgggaaaggtcttttcctttggttctggaaaagatggacaactgggaaatggtggaacacgtgaccagctgatgccgcttccagtgaaagtatcatcaagtgaagaactcaaacttgaaagccatacctcagaaaaggagttaataatgattgctggagggaatcaaagcattttgctctggataaagaaagagaattcatatgttaatctgaagaggacaattcctactctgaatgaagggactgtaaagagatggattgctgatgtggagactaaacggtggcagagcacaaaaagggaaatccaagagatattttcatctcctgcttgtctaactggaagttttttaaggaaaagaagaactacagaaatgatgcctgtttatttggacttaaataaagcaagaaacatcttcagggagttaacccaaaaggactggattactaacatgataaccacctgcctcaaagataatctgctcaaaagacttccatttcattctccaccccaagaagctttagaaattttcttccttctcccagaatgtcctgtgatgcatatttccaacaactgggagagccttgtggttccatttgcaaaggttgtttgtaaaatgagtgaccagtcttcactggttctggaagagtattgggcaactctgcaagaatccactttcagcaaactggtccagatgtttaaaacagccgtcatatgccagttggattactgggatgaaagtgctgaggagaatggtaatgttcaagctctcctagaaatgttgaagaagctgcacagggtaaaccaggtgaaatgtcaactacctgaaagtattttccaagtagacgaactcttgcaccgtctcaatttttttgtagaagtatgcagaaggtacttgtggaaaatgactgtggacgcttcagaaaatgtacaatgctgcgtcatattcagtcactttccatttatctttaataatctgtcgaaaattaaactactacatacagacacacttttaaaaatagagagtaaaaaacataaagcttatcttaggtcggcagcaattgaggaagaaagagagtctgaattcgctttgaggcccacgtttgatctaacagtcagaaggaatcacttgattgaggatgttttgaatcagctaagtcaatttgagaatgaagacctgaggaaagagttatgggtttcatttagtggagaaattgggtatgacctcggaggagtcaagaaagagttcttctactgtctgtttgcagagatgatccagccggaatatgggatgttcatgtatcctgaaggggcttcctgcatgtggtttcctgtcaagcctaaatttgagaagaaaagatacttcttttttggggttctatgtggactttccctgttcaattgcaatgttgccaacctccctttcccactggcactgtttaagaaacttttggaccaaatgccatcattggaagacttgaaagaactcagtcctgatttgggaaagaatttgcaaacacttctggatgatgaaggtgataactttgaggaagtattttacatccattttaatgtgcactgggacagaaacgacacaaacttaattcctaatggaagtagcataactgtcaaccagactaacaagagagactatgtttctaagtatatcaattacattttcaacgactctgtaaaggcggtttatgaagaatttcggagaggattttataaaatgtgcgacgaagacattatcaaattattccaccccgaagaactgaaggatgtgattgttggaaatacagattatgattggaaaacatttgaaaagaatgcacgttatgaaccaggatataacagttcacatcccaccatagtgatgttttggaaggctttccacaaattgactctggaagaaaagaaaaaattccttgtatttcttacaggaactgacagactacaaatgaaagatttaaataatatgaaaataacattttgctgtcctgaaagttggaatgaaagagaccctataagagcactgacatgtttcagtgtcctcttcctccctaaatattctacaatggaaacagttgaagaagcgcttcaagaagccatcaacaacaacagaggatttggctgaccagcttgcttgtccaacagccttattttgttgttgttatcgttgttgttgttgttgttgttgttgtttctctactttgttttgttttaggcttttagcagcctgaagccatggtttttcatttctgtctctagtgataagcaggaaagagggatgaagaagagggtttactggccggttagaacccgtgactgtattctctcccttggatacccctatgcctacatcatattccttacctcttttgggaaatatttttcaaaaataaaataaccgaaaaactaaaaaaagaaaaaaaaaaaaaaaaaaaaaaa

SEQ ID NO: 190 - protein, 1024 aa, Homo sapien
MERRSRRKSRRNGRSTAGKAAATQPAKSPGAQLWLFPSAAGLHRALLRRVEVTRQLCCSPGRLAVLERGGAGVQVHQLLAGSGGARTPKCIKLGKNMKIHSVDQGAEHMLILSSDGKPFEYDNYSMKHLRFESILQEKKIIQITCGDYHSLALSKGGELFAWGQNLHGQLGVGRKFPSTTTPQIVEHLAGVPLAQISAGEAHSMALSMSGNIYSWGKNECGQLGLGHTESKDDPSLIEGLDNQKVEFVACGGSHSALLTQDGLLFTFGAGKHGQLGHNSTQNELRPCLVAELVGYRVTQIACGRWHTLAYVSDLGKVFSFGSGKDGQLGNGGTRDQLMPLPVKVSSSEELKLESHTSEKELIMIAGGNQSILLWIKKENSYVNLKRTIPTLNEGTVKRWIADVETKRWQSTKREIQEIFSSPACLTGSFLRKRRTTEMMPVYLDLNKARNIFRELTQKDWITNMITTCLKDNLLKRLPFHSPPQEALEIFFLLPECPVMHISNNWESLVVPFAKVVCKMSDQSSLVLEEYWATLQESTFSKLVQMFKTAVICQLDYWDESAEENGNVQALLEMLKKLHRVNQVKCQLPESIFQVDELLHRLNFFVEVCRRYLWKMTVDASENVQCCVIFSHFPFIFNNLSKIKLLHTDTLLKIESKKHKAYLRSAAIEEERESEFALRPTFDLTVRRNHLIEDVLNQLSQFENEDLRKELWVSFSGEIGYDLGGVKKEFFYCLFAEMIQPEYGMFMYPEGASCMWFPVKPKFEKKRYFFFGVLCGLSLFNCNVANLPFPLALFKKLLDQMPSLEDLKELSPDLGKNLQTLLDDEGDNFEEVFYIHFNVHWDRNDTNLIPNGSSITVNQTNKRDYVSKYINYIFNDSVKAVYEEFRRGFYKMCDEDIIKLFHPEELKDVIVGNTDYDWKTFEKNARYEPGYNSSHPTIVMFWKAFHKLTLEEKKKFLVFLTGTDRLQMKDLNNMKITFCCPESWNERDPIRALTCFSVLFLPKYSTMETVEEALQEAINNNRGFG

SEQ ID NO: 191 - DNA, 1682 bp, Homo sapien
cagcggcacagcgaggtcggcagcggcacagcgaggtcggcagcggcacagcgaggtcggcagcggcacagcgaggtcggcagcggcacagcgaggtcggcagcggcacagcgaggtcggcagcggcagcgaggtcggcagcggcacagcgaggtcggcagcggcagcgaggtcggcagcggcgcgcgctgtgctcttccgcggactctgaatcatggcgaccacggccacgatggcgacctcgggctcggcgcgaaagcggctgctcaaagaggaagacatgactaaagtggaattcgagaccagcgaggaggtggatgtgacccccacgttcgacaccatgggcctgcgggaggacctgctgcggggcatctacgcttacggttttgaaaaaccatcagcaatccagcaacgagcaatcaagcagatcatcaaagggagagatgtcatcgcacagtctcagtccggcacaggaaaaacagccaccttcagtatctcagtcctccagtgtttggatattcaggttcgtgaaactcaagctttgatcttggctcccacaagagagttggctgtgcagatccagaaggggctgcttgctctcggtgactacatgaatgtccagtgccatgcctgcattggaggcaccaatgttggcgaggacatcaggaagctggattacggacagcatgttgtcgcgggcactccagggcgtgtttttgatatgattcgtcgcagaagcctaaggacacgtgctatcaaaatgttggttttggatgaagctgatgaaatgttgaataaaggtttcaaagagcagatttacgatgtatacaggtacctgcctccagccacacaggtggttctcatcagtgccacgctgccacacgagattctggagatgaccaacaagttcatgaccgacccaatccgcatcttggtgaaacgtgatgaattgactctggaaggcatcaagcaatttttcgtggcagtggagagggaagagtggaaatttgacactctgtgtgacctctacgacacactgaccatcactcaggcggtcatcttctgcaacaccaaaagaaaggtggactggctgacggagaaaatgagggaagccaacttcactgtatcctcaatgcatggagacatgccccagaaagagcgggagtccatcatgaaggagttccggtcgggcgccagccgagtgcttatttctacagatgtctgggccagggggttggatgtccctcaggtgtccctcatcattaactatgatctccctaataacagagaattgtacatacacagaattgggagatcaggtcgatacggccggaagggtgtggccattaactttgtaaagaatgacgacatccgcatcctcagagatatcgagcagtactattccactcagattgatgagatgccgatgaacgttgctgatcttatctgaagcagcagatcagtgggatgagggagactgttcacctgctgtgtactcctgtttggaagtatttagatccagattctacttaatggggtttatatggactttcttctcataaatggcctgccgtctcccttcctttgaagaggatatggggattctgctctcttttcttatttacatgtaaataatacattgttctaagtctttttcattaaaaatttaaaacttttcccat

SEQ ID NO: 192 - protein, 411 aa, Homo sapien
MATTATMATSGSARKRLLKEEDMTKVEFETSEEVDVTPTFDTMGLREDLLRGIYAYGFEKPSAIQQRAIKQIIKGRDVIAQSQSGTGKTATFSISVLQCLDIQVRETQALILAPTRELAVQIQKGLLALGDYMNVQCHACIGGTNVGEDIRKLDYGQHVVAGTPGRVFDMIRRRSLRTRAIKMLVLDEADEMLNKGFKEQIYDVYRYLPPATQVVLISATLPHEILEMTNKFMTDPIRILVKRDELTLEGIKQFFVAVEREEWKFDTLCDLYDTLTITQAVIFCNTKRKVDWLTEKMREANFTVSSMHGDMPQKERESIMKEFRSGASRVLISTDVWARGLDVPQVSLIINYDLPNNRELYIHRIGRSGRYGRKGVAINFVKNDDIRILRDIEQYYSTQIDEMPMNVADLI

SEQ ID NO: 193 - DNA, 2768 bp, Homo sapien
  unsure 1460-1493: unknown base
cgcggacggcggaaggtggactcgcgaatgttaggcctgtgggtgccatagcgaccgggaggttgggctggccagattcagctgccgggaccggaccaggtgcttaggagaacatgcagtagaacttttcatcaaacaaatggaacacgtcacagaattttgctaacatggacaactctgcacagaaaaatgaacgcactggcaaacatcccagacgtgccagtgaagtacagaaagaatgatatcccaggacctgggttctacaatgttattcaccagtcaccggtgtccaacagtgtctcattgtccaagaaaggaacttgcatgtttccctcaatgtgcgcccgattggacaccatcatttctaaataccctgcagcgaatgcatacactatcccatcggattttatttccaagagagactttagtaattcgtgttccagcatgttccagttgccaagctttatgaaagctctcaagtttgaaactcctgcaccaaactattacaatgcctctgtctcttgctgcaagcagagaaacaacgtctgtactcgagccgggtttatgtcaaaaacccaaagaggatctttcgcttttgctgataaaggacctcccccagggcattatgatatcaacgaatcccttgtgaagcagtcgccaaatacattaatgtcttgttttaaatcaaaaaccaaccgtggattaaaactgacgtcaacaggcccgggacctggttattacaaccccagtgattgcacaaaagttccaaaaaagactcttttcccgaaaaaccccatcctgaacttctctgctcagccttcgcctctgcctccgaagccacctttcccaggtcctggtcagtatgagatcgtggactacttaggcccccgcaagcatttcatctctagtgcatcattcgtgtccaataccagccggtggacagcggcgccgcctcagccaggcctgcctggcccagctacgtacaagccagagcttccaggaaagcagtccttcctctacaacgaggacaagaaatggatcccggttctgtagggatgtcacacaaggtcaaggagaactccagccaccagcccaccctgcccagcgtccccaggacattcctcaggaggagaccgatcatgagtgtggcagctgacaacttggggggtggctctaccactctggcctggcatcctagccggactgctgccattgcctttgtcttgagctggagacattgctccctggagacttcaccccagccccacagactccagtggcttcctgagcagaagggaggagtggacagagccccctggctgcttccccacgcacccatccaggctgccttccggcacgactccctgccgcagactgaagggactcctgaagcgcagacttcaaggaggatcagtccaccctgaaggtggccaagcctggaagccccacccttccctgtnnnnnnnnnnnnnnnnnnnnnnnnnnnnnnnnnnccctcactcctgcctttctcatttgtccctttctgacctcactcacttacggtatgtctactgggcgaaagctacctgcaggcaggtgatgctttttccaccagtccacagcttcctttctaaagtgaccacctgtttggaaagacctctctttactccttttagacctttttctctttggagtgggagatcatcttggaatggcagtggccgggcccgggggctgcgcttttccctgactttctctgctggcgggactgaattttctcaaggcttacaggcccttccatggagtccacatggcctgtctaggcctgatagctttcgtctctctatgtggagggaaaaagaaatgtgccctagtggttttggtggaggctgcacagattcgcggtgggtggggagctgccaggctccttttctgatctcccagcaggctttgactgacgctgtttagtctttctgtacattaaccccgccagataccgagaggttacaaagcctccaaggcctgtacaactgtggcctctccagagaagtggttctcagccttgactgcacactgtaatcacctggggactttaaaaagtactgaggcctggggcccacccacaaatgctgatttaactcctccagggtggggtctgggcagtggggaggcaggagccacccaggtgattccaatgataggtgtaggttgagaagcgccaccttccagcttcctaactggctctgggaggggagctgggtgggaagttcaggaggtgggaactttgtacacgcagagcacctggagcacctacagcatggctgtggttccacactcctctgtcatttaaccttcacacatcacctcgttctgacatcaagggtgcgtcacagccacagtgaggcctcgcctgggcagagcaactctgggtgccccactgggtccctcccacaggggcaggcaagcctaatgggaacccgaggcaaaaggaaacatcagtaatacgaatcctgtctttaaaactgtgatgttttgttcaccatggattttttttttggggggggggccttaattttaaaaatattgcattaaacttatttatcttgcttattgagcttttgggtaccccttaatttttgtgccttaggctagagactcacctgcccatagccttgactctaggtaggggcttgggaattaggaccacagactgtcagcgctgggaggttcttagagggatcatggttttcacacctttttaaaaaaagttttactcagacagatgt

SEQ ID NO: 194 - protein, 350 aa, Homo sapien
RTAEGGLANVRPVGAIARPGGWAGQIQLPGPDQVLRRTCSRTFHQTNGTRHRILLTWTTLHRKMNALANIPDVPVKYRKNDIPGPGFYNVIHQSPVSNSVSLSKKGTCMFPSMCARLDTIISKYPAANAYTIPSDFISKRDFSNSCSSMFQLPSFMKALKFETPAPNYYNASVSCCKQRNNVCTRAGFMSKTQRGSFAFADKGPPPGHYDINESLVKQSPNTLMSCFKSKTNRGLKLTSTGPGPGYYNPSDCTKVPKKTLFPKNPILNFSAQPSPLPPKPPFPGPGQYEIVDYLGPRKHFISSASFVSNTSRWTAAPPQPGLPGPATYKPELPGKQSFLYNEDKKWIPVL

SEQ ID NO: 195 - DNA, 634 bp, Homo sapien
cggctgagaggcagcgaactcatctttgccagtacaggagcttgtgccgtggcccacagcccacagcccacagccatgggctgggacctgacggtgaagatgctggcgggcaacgaattccaggtgtccctgagcagctccatgtcggtgtcagagctgaaggcgcagatcacccagaagattggcgtgcacgccttccagcagcgtctggctgtccacccgagcggtgtggcgctgcaggacagggtcccccttgccagccagggcctgggccctggcagcacggtcctgctggtggtggacaaatgcgacgaacctctgagcatcctggtgaggaataacaagggccgcagcagcacctacgaggtccggctgacgcagaccgtggcccacctgaagcagcaagtgagcgggctggagggtgtgcaggacgacctgttctggctgaccttcgaggggaagcccctggaggaccagctcccgctgggggagtacggcctcaagcccctgagcaccgtgttcatgaatctgcgcctgcggggaggcggcacagagcctggcgggcggagctaagggcctccaccagcatccgagcaggatcaagggccggaaataaaggctgttgtaagagaat

SEQ ID NO: 196 - protein, 165 aa, Homo sapien
MGWDLTVKMLAGNEFQVSLSSSMSVSELKAQITQKIGVHAFQQRLAVHPSGVALQDRVPLASQGLGPGSTVLLVVDKCDEPLSILVRNNKGRSSTYEVRLTQTVAHLKQQVSGLEGVQDDLFWLTFEGKPLEDQLPLGEYGLKPLSTVFMNLRLRGGGTEPGGRS

SEQ ID NO: 197 - DNA, 2687 bp, Homo sapien
ccagttagagctcgggtctcctcgccacagctccgagtctttcgttctgggaggcccaggcggcttcgcgttctgagaataaacagaacctctgttgctctgcgacttgcaggcactgggagattcgtagctaagacgccagggcatcccggaagctgggaaatgggactgttgacattcagggatgtggccgtagaattctctttggaggagtgggaacacctggaaccagctcagaagaatttgtatcaggatgtgatgttagaaaactacagaaacctggtctctctgggtcttgttgtctctaagccggacctgatcacctttttggaacaaaggaaagagccttggaatgtgaagagtgaggagacagtagccatccagccagatgtgttttcgcattataacaaggacctgttgacagagcactgcacagaagcttcattccaaaaagtgatatcgaggagacatgggagctgtgatcttgagaatttacatttaagaaaaaggtggaaaagggaggagtgtgaagggcacaatggatgttatgatgaaaagacttttaaatatgatcaatttgatgaatcctctgttgaaagtttgtttcaccagcaaatactttcttcttgtgccaaaagctataactttgatcaatataggaaggtctttactcattcatcattgcttaatcaacaagaggaaatagatatttggggaaaacatcacatatatgataaaacttcagtgttatttaggcaggtctctactctaaatagttaccgaaatgtttttattggagagaaaaattatcattgcaataattctgaaaaaaccttgaaccaaagctcaagccctaaaaatcatcaggaaaattattttctagaaaaacaatacaaatgtaaagaatttgaggaagtctttcttcagagtatgcatgggcaagagaaacaagaacagtcttacaaatgtaataaatgtgtagaagtttgtacccagtcattaaaacatattcaacatcagaccatccatatcagagaaaactcatatagctataacaaatatgataaagatcttagtcagtcatcaaatcttagaaagcagataatccataatgaagagaaaccatacaaatgtgaaaaatgtggggatagcttaaaccatagtttgcaccttactcaacatcagatcattcctaccgaagagaaaccctataaatggaaagaatgtggcaaggtctttaaccttaactgtagtttataccttactaaacagcagcaaattgatactggagaaaacctttacaaatgtaaagcatgtagcaaatcttttactcgttcctccaatcttattgtgcatcagagaattcacactggagagaaaccatacaaatgtaaagaatgtggcaaagcctttcgctgtagttcataccttactaaacataagcgaattcatactggagagaaaccttataaatgtaaagaatgtggaaaagcttttaaccgtagttcatgccttactcaacatcagacaactcatacaggagaaaaactttacaaatgtaaagtatgtagcaaatcttatgctcgttcttcaaatcttattatgcatcagagagttcatactggagagaagccttataaatgtaaagaatgtggcaaagtctttagccgtagttcttgccttactcaacatcggaaaattcatactggagaaaatctttacaaatgcaaagtatgtgctaaaccttttacttgtttctcaaatcttattgtgcatgagagaattcatactggagagaaaccctataaatgtaaagaatgtggcaaagcctttccttatagttcacaccttattcgacattatcgaattcatactggagaaaaaccatacaaatgtaaagcatgtagcaaatcttttagtgactcctcaggtctttctgtgcatcggcgaactcatactggagagaaaccctatacatgtaaagaatgtggcaaagcctttagttatagttcagatgttattcagcatcggagaattcatactggccagagaccctacaaatgtgaagaatgtggcaaagccttcaactataggtcatacctcactacacatcagagaagtcatactggagagagaccctacaaatgtgaagaatgtggcaaagccttcaactctaggtcatacctcactacacatcggagaagacatactggagagagaccctacaaatgtgatgaatgtggtaaagccttcagctataggtcatacctcactacacatcggagaagtcatagtggagagagaccctacaaatgtgaagaatgtggcaaagcctttaactctaggtcatacctcattgcacatcagagaagtcatactagagaaaaactttaaaaatgtaaaacatggagcagattttttacttgttacccatgtcttattgtgcatcagataatttatatgggagtgaaaccctacaaatgttaagaatgtggcataacctttaactattttcaagccttacacaatagcagagaatataaactgaaaaaatccatacaaatattaaaaatgtggcaaattattttaaactgtgctcaacccttactcaagataatccatactagagaaacactatagatgtaaaaatgtgaaaagttttattcaaaatatcaaacttatgagtc

SEQ ID NO: 198 - protein, 743 aa, Homo sapien
MGLLTFRDVAVEFSLEEWEHLEPAQKNLYQDVMLENYRNLVSLGLVVSKPDLITFLEQRKEPWNVKSEETVAIQPDVFSHYNKDLLTEHCTEASFQKVISRRHGSCDLENLHLRKRWKREECEGHNGCYDEKTFKYDQFDESSVESLFHQQILSSCAKSYNFDQYRKVFTHSSLLNQQEEIDIWGKHHIYDKTSVLFRQVSTLNSYRNVFIGEKNYHCNNSEKTLNQSSSPKNHQENYFLEKQYKCKEFEEVFLQSMHGQEKQEQSYKCNKCVEVCTQSLKHIQHQTIHIRENSYSYNKYDKDLSQSSNLRKQIIHNEEKPYKCEKCGDSLNHSLHLTQHQIIPTEEKPYKWKECGKVFNLNCSLYLTKQQQIDTGENLYKCKACSKSFTRSSNLIVHQRIHTGEKPYKCKECGKAFRCSSYLTKHKRIHTGEKPYKCKECGKAFNRSSCLTQHQTTHTGEKLYKCKVCSKSYARSSNLIMHQRVHTGEKPYKCKECGKVFSRSSCLTQHRKIHTGENLYKCKVCAKPFTCFSNLIVHERIHTGEKPYKCKECGKAFPYSSHLIRHYRIHTGEKPYKCKACSKSFSDSSGLSVHRRTHTGEKPYTCKECGKAFSYSSDVIQHRRIHTGQRPYKCEECGKAFNYRSYLTTHQRSHTGERPYKCEECGKAFNSRSYLTTHRRRHTGERPYKCDECGKAFSYRSYLTTHRRSHSGERPYKCEECGKAFNSRSYLIAHQRSHTREKL

SEQ ID NO: 199 - DNA, 744 bp, Homo sapien
  unsure 397-421: unknown base
gcagtgtcactcttttcagaaatatgtccatggtggtttactcaatttgcttcttttttattcatagatttgcatatgtaatgcattgcgctataccattaagacagctatgatgtcactgcagttacagtgtcactaggtgatagaaattgtccagctccattacaaccttatggaaccactggtgcatacgtggttcattgtggtccattgttgactgaaacaatgttatgaggtgcgtaactatatatccaaagcaaaagctaaatgaaataaatgaaactaattgtgttggtgtcctaaacacacagaggagaattacttcaagtatttttaaaacacagtcacttgtctatgcatttttagtggatatgccctaaagtatgaaactaaattnnnnnnnnnnnnnnnnnnnnnnnnnaaattaatttacaaatagtattaatattgaataataatatatgttaatattgttactctgaatctattatatacattttggaggataaataacatgcaattttgttaatattaggaatcaagaaactatatatataaaatcaaagctgctaaataaaattataaattgtgtttataattacaaatttgaattggaaatatcattataaaatcataatgtatttcctttacagaagcacattttctagccctgttatttgaaaatcagtaatgagcacccttagaatgcagattatagtctctaaatgcaattttctgctaaaa

SEQ ID NO: 200 - protein, 36 aa, Homo sapien
SVTLFRNMSMVVYSICFFFIHRFAYVMHCAIPLRQL

SEQ ID NO: 201 - DNA, 1205 bp, Homo sapien
gggcagaaagggcacgctcttgtgggtgactacaggttaggagaccgttgaacctggaggggccctaggatggaccccgtggaaagattcagagactgcgccctctccctggcgccgccttcccctacacgcggcgggtatattctgttgcagttggcccaggacctgtttccaagactctgccccctcgcacttccgtccctcctggttttgtaaagtgatgctcataggaacccccaccccgcgtgacactactcccagctcctggctgacttctagtcttctggttgaagctgcgcctttagatgacacgaccctacccacccctgtttccagcggatgcccgggcctggagcccacagaattcttccagtccctgggtggggacggagaaaggaacgttcagattgagatggcccatggcaccaccacgctcgccttcaagttccagcatggagtgattgcagcagtggattctcgggcctcagctgggtcctacattagtgccttacgggtgaacaaggtgattgagattaacccttacctgcttggcaccatgtctggctgtgcagcagactgtcagtactgggagcgcctgctggccaaggaatgcaggctgtactatctgcgaaatggagaacgtatttcagtgtcggcagcctccaagctgctgtccaacatgatgtgccagtaccggggcatgggcctctctatgggcagtatgatctgtggctgggataagaagggtcctggactctactacgtggatgaacatgggactcggctctcaggaaatatgttctccacgggtagtgggaacacttatgcctacggtgtcatggacagtggctatcggcctaatcttagccctgaagaggcctatgaccttggccgcagggctattgcttatgccactcacagagacagctattctggaggcgttgtcaatatgtaccacatgaaggaagatggttgggtgaaagtagaaagtacagatgtcagtgacctgctgcaccagtaccgggaagccaatcaataatggtggtggtggcagctgggcaggtctcctctgggaggtcttggccgactcagggacctaagccacgttaagtccaaggagaagaagaggcctagcctgagccaaagagagagtacgggctcagcagccagaggaggccggtgaagtgcatcttctgcgtgttctc

SEQ ID NO: 202 - protein, 272 aa, Homo sapien
MLIGTPTPRDTTPSSWLTSSLLVEAAPLDDTTLPTPVSSGCPGLEPTEFFQSLGGDGERNVQIEMAHGTTTLAFKFQHGVIAAVDSRASAGSYISALRVNKVIEINPYLLGTMSGCAADCQYWERLLAKECRLYYLRNGERISVSAASKLLSNMMCQYRGMGLSMGSMICGWDKKGPGLYYVDEHGTRLSGNMFSTGSGNTYAYGVMDSGYRPNLSPEEAYDLGRRAIAYATHRDSYSGGVVNMYHMKEDGWVKVESTDVSDLLHQYREANQ

SEQ ID NO: 203 - DNA, 1008 bp, Homo sapien
cccgaattttccggctcgaatgcccggcagccgtggcggctagagcgttcctccccagctcgaatgcccggcggcgaggcggctagagcgtcgcctcctcccggggaaccgcgtgtgaccttccagcccgcggaccgatgctgccggcggccgctcgccccctgtgggggccttgccttgggcttcgggccgctgcgttccgccttgccaggcgacaggtgccatgtgtctgtaccgtgcgacatatgaggagcagcggccatcagaggtgtgaggccctcgctggtgcacccctggataacgcccccaaggagtacccccccaagatacagcagctggtccaggacatcgccagcctcactctcttggaaatctcagacctcaacgagctcctgaagaaaacgttgaagatccaggatgtcgggcttgtgccgatgggtggtgtgatgtctggggctgtccctgctgcagcagcccaggaggcggtggaagaagatatccccatagcgaaagaacggacacatttcaccgtccgcctgaccgaggcgaagcccgtggacaaagtgaagctgatcaaggaaatcaagaactacatccaaggcatcaacctcgtccaggcaaagaagctggtggagtccctgccccaggaaatcaaagccaatgtcgccaaagctgaggcggagaagatcaaggcggccctggaggcggtgggcggcaccgtggttctggagtagcctccagctcggaggacttgtgttcaggggtcctgggccccggcgaggtcccgccctcccgtggtcactggctccgcccccagcaccaggcgcccagtggagccgtttgggagaattgcctgcgccacgcagcgggccggacaggccgcacagacctactgtggcgggagggaggggcggctgctgcctggtgacggcacccggaagcccaccaggacgcgccaccggtcaatgtgcctctggtggctgctgagaaaaatacactgtgcagctc

SEQ ID NO: 204 - protein, 198 aa, Homo sapien
MLPAAARPLWGPCLGLRAAAFRLARRQVPCVCTVRHMRSSGHQRCEALAGAPLDNAPKEYPPKIQQLVQDIASLTLLEISDLNELLKKTLKIQDVGLVPMGGVMSGAVPAAAAQEAVEEDIPIAKERTHFTVRLTEAKPVDKVKLIKEIKNYIQGINLVQAKKLVESLPQEIKANVAKAEAEKIKAALEAVGGTVVLE

SEQ ID NO: 205 - DNA, 3178 bp, Homo sapien
ggcaccgattcggggcctgcccggacttcgccgcacgctgcagaacctcgcccagcgcccaccatgccccggcagctcagcgcggcggccgcgctcttcgcgtccctggccgtaattttgcacgatggcagtcaaatgagagcaaaagcatttccagaaaccagagattattctcaacctactgcagcagcaacagtacaggacataaaaaaacctgtccagcaaccagctaagcaagcacctcaccaaactttagcagcaagattcatggatggtcatatcacctttcaaacagcggccacagtaaaaattccaacaactaccccagcaactacaaaaaacactgcaaccaccagcccaattacctacaccctggtcacaacccaggccacacccaacaactcacacacagctcctccagttactgaagttacagtcggccctagcttagccccttattcactgccacccaccatcaccccaccagctcatacagctggaaccagttcatcaaccgtcagccacacaactgggaacaccactcaacccagtaaccagaccacccttccagcaactttatcgatagcactgcacaaaagcacaaccggtcagaagcctgatcaacccacccatgccccaggaacaacggcagctgcccacaataccacccgcacagctgcacctgcctccacggttcctgggcccacccttgcacctcagccatcgtcagtcaagactggaatttatcaggttctaaacggaagcagactctgtataaaagcagagatggggatacagctgattgttcaagacaaggagtcggttttttcacctcggagatacttcaacatcgaccccaacgcaacgcaagcctctgggaactgtggcacccgaaaatccaaccttctgttgaattttcagggcggatttgtgaatctcacatttaccaaggatgaagaatcatattatatcagtgaagtgggagcctatttgaccgtctcagatccagagacagtttaccaaggaatcaaacatgcggtggtgatgttccagacagcagtcgggcattccttcaagtgcgtgagtgaacagagcctccagttgtcagcccacctgcaggtgaaaacaaccgatgtccaacttcaagcctttgattttgaagatgaccactttggaaatgtggatgagtgctcgtctgactacacaattgtgcttcctgtgattggggccatcgtggttggtctctgccttatgggtatgggtgtctataaaatccgcctaaggtgtcaatcatctggataccagagaatctaattgttgcccggggggaatgaaaataatggaatttagagaactctttcatcccttccaggatggatgttgggaaattccctcagagtgtgggtccttcaaacaatgtaaaccaccatcttctattcaaatgaagtgagtcatgtgtgatttaagttcaggcagcacatcaatttctaaatactttttgtttattttatgaaagatatagtgagctgtttattttctagtttcctttagaatattttagccactcaaagtcaacatttgagatatgttgaattaacataatatatgtaaagtagaataagccttcaaattataaaccaagggtcaattgtaactaatactactgtgtgtgcattgaagattttattttacccttgatcttaacaaagcctttgctttgttatcaaatggactttcagtgcttttactatctgtgttttatggtttcatgtaacatacatattcctggtgtagcacttaactccttttccactttaaatttgtttttgttttttgagacggagtttcactcttgtcacccaggctggagtacagtggcacgatctcggcttatggcaacctccgcctcccgggttcaagtgattctcctgcttcagcttcccgagtagctgggattacaggcacacactaccacgcctggctaatttttgtatttttattatagacgggtttcaccatgttggccagactggtcttgaactcttgacctcaggtgatccacccacctcagcctcccaaagtgctgggattacaggcatgagccattgcgcccggccttaaatgttttttttaatcatcaaaaagaacaacatatctcaggttgtctaagtgtttttatgtaaaaccaacaaaaagaacaaatcagcttatattttttatcttgatgactcctgctccagaattgctagactaagaattaggtggctacagatggtagaactaaacaataagcaagagacaataataatggcccttaattattaacaaagtgccagagtctaggctaagcactttatctatatctcatttcattctcacaacttataagtgaatgagtaaactgagacttaagggaactgaatcacttaaatgtcacctggctaactgatggcagagccagagcttgaattcatgttggtctgacatcaaggtctttggtcttctccctacaccaagttacctacaagaacaatgacaccacactctgcctgaaggctcacacctcataccagcatacgctcaccttacagggaaatgggtttatccaggatcatgagacattagggtagatgaaaggagagctttgcagataacaaaatagcctatccttaataaatcctccactctctggaaggagactgaggggctttgtaaaacattagtcagttgctcatttttatgggattgcttagctgggctgtaaagatgaaggcatcaaataaactcaaagtatttttaaatttttttgataatagagaaacttcgctaaccaactgttctttcttgagtgtatagccccatcttgtggtaacttgctgcttctgcacttcatatccatatttcctattgttcactttattctgtagagcagcctgccaagaattttatttctgctgttttttttgctgctaaagaaaggaactaagtcaggatgttaacagaaaagtccacataaccctagaattcttagtcaaggaataattcaagtcagcctagagaccatgttgactttcctcatgtgtttccttatgactcagtaagttggcaaggtcctgactttagtcttaataaaacattgaattgtagtaaaggtttttgcaataaaaacttactttgg

SEQ ID NO: 206 - protein, 416 aa, Homo sapien
MPRQLSAAAALFASLAVILHDGSQMRAKAFPETRDYSQPTAAATVQDIKKPVQQPAKQAPHQTLAARFMDGHITFQTAATVKIPTTTPATTKNTATTSPITYTLVTTQATPNNSHTAPPVTEVTVGPSLAPYSLPPTITPPAHTAGTSSSTVSHTTGNTTQPSNQTTLPATLSIALHKSTTGQKPDQPTHAPGTTAAAHNTTRTAAPASTVPGPTLAPQPSSVKTGIYQVLNGSRLCIKAEMGIQLIVQDKESVFSPRRYFNIDPNATQASGNCGTRKSNLLLNFQGGFVNLTFTKDEESYYISEVGAYLTVSDPETVYQGIKHAVVMFQTAVGHSFKCVSEQSLQLSAHLQVKTTDVQLQAFDFEDDHFGNVDECSSDYTIVLPVIGAIVVGLCLMGMGVYKIRLRCQSSGYQRI

SEQ ID NO: 207 - DNA, 1948 bp, Homo sapien
atggcattggtttttccatttttgcaaatctctttagtctggctgacggaagacggctggacccacatgcctcgtgccttctggagatcctcccaggctcctgcggactgagtgacgaggcagatagtgtctatattactgttgaaccacacagacctgaaagggcctcggggacccccagccatgctgaccacaccccaagagctggggcccagatggaaagacagggaaggctggctttgatgggtggagctcaaaccagatagaggacaagggggcctggccacccgcacagacactcccagacacagagaacaggcagggggcttccagaccccttcccaagcagttctctgggtttgttggacacaggaagaggaagctgctcacctttgtccctaagcccagggcctgtgccctgtgtggctggtctggaacagccttgctgcccttgcctggggttggaaccagggcctctggggtcctgcggacctttgttctcgcaccagccttgggcctgcgctgggcagtggccccccgctcggttgccgcgcctccctcctaacattgccagagtgaaacactcctagtctctcggctttgcttgtatttctttactgccatgtctttcttgttgttccgtatttgaagacccatgtgataaatttcttcaaagctaggaaggagttttgtctctctgcgtgagatattggctgcttgctggaacctggggcccaggtttggcctcagcctcatttccagatgccttggtgcccacatctctcttctcctacttggctctcccctttttatttctttataaaaatgaaggtggtgaactaagcagcctcaggctttagaagtgagtccctggcatcggtgaggccacccacacagccattccctgtacatcaggagggtggtctcactctgtacctatcacccaggttctcgggaccggaagtcaggtgggagactgggctccccgaagccagagcggcagagaggccagaactccaaagcccctgcagccccggctgacaggaagcgccagctgtcaccccagtccaagagctccagcaaggtcacgagcgtgcccggcaaagcctcggatcccggcgccgccagcaccaaatcagggaaggccagcacgctgtctcggcgggaggagctgctgaaacagctgaaggccgtggaggatgctattgcacgcaagcgggccaagatccccgggaaagcataggccgtgccccgaccggactggacgcatttttatacatagggtaagcgcagccattttggattttgcagttaatgtcttattttggctgtgattctttttaaaaagtaaaaaagaaaaaaaagtttctcagctggaaaagaagccacacaggaaatgacaacgacgctgaatcccagcctccctccccagagcagaagtcccgcaggacagacagacacagacagcgctagtgaccagcacggttctcatgtaaattacaagccccagccgccagccccgccttctcttcctcctcctccgtcttcttccctggccctggtcaggcctgtggagccccagctctgggtccctagcccgggtccaggcagccaggctccctcctgagctgagaaacggaacctcgcgaaccactggtggcacatccttctcctcccccgcccctgatcacccgcccccggatcagaaatatatctatattctcgactaaagtctcatcaggaaatatttcctgtcttttattttaagcatcaaattgttttagttgatttaaaaaggaaaaaatacagaaaagaccaaaaaaaggccaagggtgttgttggggcgtctgtctaatgtggtgggtctttttttgaggggtctcctaaaataaaatattttgataagcaaaaaaatctatgtcggtgcggagaaagaggtaatgaaatg

SEQ ID NO: 208 - protein, 87 aa, Homo sapien [sequence omitted]

SEQ ID NO: 209 - DNA, 2173 bp, Homo sapien
cggtccggacagccgcgcgctgagggtctcggggcgggcgccgcgggacctctccgggccatggcagcccctgtcaaagggaacaggaagcagtccacggagggtgacgccctagacccacctgcatcccccaaacctgctggcaagcagaacggaatccagaaccccatctcgctggaggactcccccgaggcaggcggggagcgggaggaggagcaggagcgggaggaggagcaggccttcctggtcagcctctacaagttcatgaaggagcgacacacgcccatcgagagggtgccccatctcggcttcaagcagattaacctgtggaagatctacaaagcagtggagaagctgggggcctatgagctggtgaccgggcgccgcctctggaagaacgtgtacgacgagctggggggcagcccaggcagcaccagcgcggccacgtgcacgcgccgccactacgagaggctggtcctgccatacgtgcggcacctgaagggggaggatgacaagccgctgcccacctccaagcccaggaaacagtacaagatggctaaggagaacaggggggatgatggggccaccgagaggccgaagaaggccaaggaggagcggcgcatggaccagatgatgccaggaaagaccaaagcagatgctgctgacccagcaccacttcccagccaggagccccccaggaacagcacagaacagcagggcctggcctctgggtcttctgtgtcctttgtgggtgccagcggctgtcctgaggcctacaagcggctcctatccagcttctactgcaaggggacacacggcatcatgtcaccactggccaaaaagaagctcctggcccaggtgagcaaggtggaggccttgcagtgccaggaggagggctgccgccatggggcagagccccaggcgtccccagctgttcacctcccagagagtccccagagccccaaagggctgactgagaactccaggcaccggctgacccctcaggagggattgcaggccccaggtggcagcctcagagaggaggcgcaggcaggcccctgcccggcagcccccatcttcaagggctgcttctacacccaccccaccgaggtgctgaagcctgtcagccagcaccccagggacttcttctctagacttaaagatggggtgctattggggcctcctggcaaagaggggctgtcagtgaaagagccccagctggtgtggggcggagacgctaaccgcccttctgcgttccataaaggtggctccagaaagggcatcctctaccccaagcccaaagcctgctgggtgtcccccatggccaaggtcccagccgagagccccacgctcccgcccaccttccccagtagcccaggcctgggcagcaagcgcagcctggaggaagagggtgctgcccacagtgggaagagactgcgggccgtgtctccctttcttaaggaggcggatgccaagaagtgtggggccaaacctgcagggtccggcctggtctcctgccttctgggcccagccctggggcctgtgcccccagaggcctacaggggcaccatgctgcactgcccgctgaacttcactggcaccccgggccccttgaagggccaggctgcactccccttcagccccctggtcatcccggccttcccggcccacttcctggccaccgcaggcccctcgcccatggccgctggcctgatgcacttccccccaacgtccttcgacagtgccctccgccacagactttgcccggcctcatctgcctggcacgcaccaccagtcacaacctatgcagcgccccacttcttccacctcaacaccaagctgtaggccagcccatggtgttgtgtacactgtggagtcgacaggggcctacaacaggcaggtactgctgccagggggctctgaactagtgcctgctacccaggacacccgggccatgcccctggctgggcagcctggcacaagtgaagaagaaggcagtgggaaaactgggtttatctcaaggcagcagcctgagcccaggagcagaggacccagttgttataaggcgctgggagaggatgggcagctcccactgccccagagcggasstcgaagcacccaggttgcccacggaaaatccaataaaaagacaccagtgtgaatccaaaaaaaa

SEQ ID NO: 210 - protein, 614 aa, Homo sapien
RSGQPRAEGLGAGAAGPLRAMAAPVKGNRKQSTEGDALDPPASPKPAGKQNGIQNPISLEDSPEAGGEREEEQEREEEQAFLVSLYKFMKERHTPIERVPHLGFKQINLWKIYKAVEKLGAYELVTGRRLWKNVYDELGGSPGSTSAATCTRRHYERLVLPYVRHLKGEDDKPLPTSKPRKQYKMAKENRGDDGATERPKKAKEERRMDQMMPGKTKADAADPAPLPSQEPPRNSTEQQGLASGSSVSFVGASGCPEAYKRLLSSFYCKGTHGIMSPLAKKKLLAQVSKVEALQCQEEGCRHGAEPQASPAVHLPESPQSPKGLTENSRHRLTPQEGLQAPGGSLREEAQAGPCPAAPIFKGCFYTHPTEVLKPVSQHPRDFFSRLKDGVLLGPPGKEGLSVKEPQLVWGGDANRPSAFHKGGSRKGILYPKPKACWVSPMAKVPAESPTLPPTFPSSPGLGSKRSLEEEGAAHSGKRLRAVSPFLKEADAKKCGAKPAGSGLVSCLLGPALGPVPPEAYRGTMLHCPLNFTGTPGPLKGQAALPFSPLVIPAFPAHFLATAGPSPMAAGLMHFPPTSFDSALRHRLCPASSAWHAPPVTTYAAPHFFHLNTKL

SEQ ID NO: 211 - DNA, 2239 bp, Homo sapien
aagcttgcacgaggccttcccggcggctgattcgagggcttgtttggtcagaaggggggcgtcagagaagctgccccttagccaaccatgccgtctgagggtcgctgctgggagaccttgaaggccctacgcagttccgacaaaggtcgcctttgctactaccgcgactggctgctgcggcgcgaggatgttttagaagaatgtatgtctcttcccaagctatcttcttattctggatgggtggtagagcacgtcctaccccatatgcaggagaaccaacctctgtctgagacttcgccatcctctacgtcagcttcagccctagatcaaccctcatttgttcccaaatctcctgacgcaagctctgccttttccccagcctcccctgcaacaccaaatggaaccaagggcaaagatgagtcccagcacacagaatctatggtacttcagtcctcacgggggatcaaagtggaaggctgcgtccgaatgtacgaactggtacacagaatgaaaggaacagagggcctgaggctatggcaggaggagcaggagaggaaggtgcaagccctctcggagatggcatctgaacaactgaagcggtttgatgaatggaaggaactgaagcagcataaagaattccaggacttgcgggaagtaatggagaagagctccagagaagccttgggacaccaagagaagttaaaagctgagcaccgtcacagagcaaagattctcaacctgaagctgcgggaagcagagcagcagcgcgtgaagcaagcagaacaggagcggcttcggaaggaagaaggccagatccgcctgcgggccctctatgctctgcaggaggagatgctgcagctcagccagcagctggatgcctctgagcagcacaaagccctgcttaaggtcgacctggctgccttccagacccgaggcaaccagctgtgcagcctcatctcagggatcatccgggcctcttcagagagcagctatcccacagcagagagtcaagctgaggctgagcgagctctgcgggaaatgcgggacctcctgatgaacttggggcaggagatcaccagagcctgcgaagacaagaggaggcaggatgaagaagaggcccaggtaaagctgcaagaggcacagatgcagcagggaccagaggcccacaaagagcccccagctcccagccagggcccaggagggaaacagaatgaagacctccaggtgaaggtacaagacattacaatgcagtggtaccagcagctgcaggatgcttccatgcagtgtgtgttgacctttgagggcctgaccaacagcaaggacagtcaggccaaaaagataaagatggacctccagaaggctgctaccatcccagtgagccaaatctctaccattgcaggctcaaaactgaaggagatctttgacaagatccacagcctgctctctggaaaacctgttcaatctggtgggcgctctgtgtctgtcacacttaacccacaggggctggactttgttcaatacaaactggcagagaaatttgtgaaacaaggcgaggaggaagtggcctctcaccatgaagcagcattccccattgcagttgtggcatccgggatctgggagctccaccccagagtgggggacctcattcttgctcatctacataagaagtgtccttactctgttcctttctatcccactttcaaggagggaatggctttggaagactatcagaggatgcttggttaccaagtaaaggattccaaagtggagcagcaagacaactttctaaaacgcatgtcagggatgatccgtctctacgctgctatcatccagctccggtggccatatggaaaccgacaggagattcaccctcatggcttaaatcatggatggcgctggttggcacagatcttaaacatggagcccttgtcagatgtgacagccaccctcctctttgacttcctggaggtgtgtgggaatgccctcatgaagcaataccaggttcagttctggaagatgctaattctcatcaaagaggactactttcccaggtatcaggcttgttgagcagacagcaggggattaagtaactcataaccaggcctcagatacccaagggtgctattacctgctggttttgattcaagttaaaaacacctgtactaagtatgacatctttcctactccagtccctctcgttgatatttgaataaatgcttttgaaccttaaaaaaaaaaa

SEQ ID NO: 212 - protein, 659 aa, Homo sapien
MPSEGRCWETLKALRSSDKGRLCYYRDWLLRREDVLEECMSLPKLSSYSGWVVEHVLPHMQENQPLSETSPSSTSASALDQPSFVPKSPDASSAFSPASPATPNGTKGKDESQHTESMVLQSSRGIKVEGCVRMYELVHRMKGTEGLRLWQEEQERKVQALSEMASEQLKRFDEWKELKQHKEFQDLREVMEKSSREALGHQEKLKAEHRHRAKILNLKLREAEQQRVKQAEQERLRKEEGQIRLRALYALQEEMLQLSQQLDASEQHKALLKVDLAAFQTRGNQLCSLISGIIRASSESSYPTAESQAEAERALREMRDLLMNLGQEITRACEDKRRQDEEEAQVKLQEAQMQQGPEAHKEPPAPSQGPGGKQNEDLQVKVQDITMQWYQQLQDASMQCVLTFEGLTNSKDSQAKKIKMDLQKAATIPVSQISTIAGSKLKEIFDKIHSLLSGKPVQSGGRSVSVTLNPQGLDFVQYKLAEKFVKQGEEEVASHHEAAFPIAVVASGIWELHPRVGDLILAHLHKKCPYSVPFYPTFKEGMALEDYQRMLGYQVKDSKVEQQDNFLKRMSGMIRLYAAIIQLRWPYGNRQEIHPHGLNHGWRWLAQILNMEPLSDVTATLLFDFLEVCGNALMKQYQVQFWKMLILIKEDYFPRYQAC

SEQ ID NO: 213 - DNA, 1477 bp, Homo sapien
  unsure 30: unknown base
ggttcaccatcatcctcaccaacttttggnccataattcacccaaccctttggtggagcctgaaaaaaatctgggcagaatgtaggacttctttattttgtttaaaggggtaacacagagtgcccttatgaaggagttggagatcctgcaaggaagagaaggagtgaaggagagatcaagagagagaaacaatgaggaacatttcatttgacccaacatcctttaggagcataaatgttgacactaagttatcccttttgtgctaaaatggacagtattggcaaaatgataccacaacttcttattctctggctctatattgctttggaaacacttaaacatcaaatggagttaaatacatatttgaaatttaggttaggaaatattggtgaggaggcctcaaaaagggggaaacatcttttgtctgggaggatattttccattttgtggatttccctgatctttttctaccaccctgaggggtggtgggaattatcattttgctacattttagaggtcatccaggatttttgaaactttacattctttacggttaagcaagatgtacagctcagtcaaagacactaaattcttcttagaaaaatagtgctaaggagtatagcagatgacctatatgtgtgttggctgggagaatatcatcttaaagtgagagtgatgttgtggagacagttgaaatgtcagtgctagagcctctgtggtgtgaatgggcacgttaggttgttgcattagaaagtgactgtttctgacagaaatttgtagctttgtgcaaactcacccaccatctacctcaataaaatatagagaaaagaaaaatagagcagtttgagttctatgaggtatgcaggcccagagagacataagtatgttcctttagtcttgcttcctgtgtgccacactgcccctccacaaccatagctgggggcaattgtttaaagtcattttgttcccgactagctgccttgcacattatcttcattttcctggaatttgatacagagagcaatttatagccaattgatagcttatgctgtttcaatgtaaattcgtggtaaataacttaggaactgcctcttctttttctttgaaaacctacttataactgttgctaataagaatgtgtattgttcaggacaacttgtctccatacagttgggttgtaaccctcatgcttggcccaaataaactctctacttatatcagtttttcctacacttcttccttttaggtcaacaataccaagaggggttactgtgctgggtaatgtgtaaacttgtgtcttgtttagaaagataaatttaaagactatcacattgctttttcataaaacaagacaggtctacaattaatttattttgatgcaaattgataggggggccaagtaagccccatatgcttaatgatcagctgatgaataatcatctcctagcaacataactcaatctaatgctaaggtacc

SEQ ID NO: 214 - protein, 82 aa, Homo sapien
MIPQLLILWLYIALETLKHQMELNTYLKFRLGNIGEEASKRGKHLLSGRIFSILWISLIFFYHPEGWWELSFCYILEVIQDF

SEQ ID NO: 215 - DNA, 1906 bp, Homo sapien
aatctgtggtttttgctcaaaactcagtctatctggatgcgttgaattatagacagatgtctggccgtgctggaagaagaggtcaagacctgatgggagatgtatatttctttgatattccattccccaaaataggaaaactcataaaatccaatgttcctgagctgagaggacacttccctctcagcataaccctggtcctgcgactcatgctgctggcttccaagggagatgacccagaggatgccaaggcaaaggtgctatcagtgctaaagcattcattgctgtccttcaagcaacccagagtcatggacatgttaaaactttacttcctgttttctttgcagttcctggtgaaagagggctatttagatcaagaaggtaatcctatggggtttgctggacttgtgtcacatttgcattatcatgaaccttctaatcttgtttttgtgagttttcttgtaaatggcctcttccatgatctctgtcagccaaccaggaaaggctcaaaacatttttctcaagacgttatggaaaagctagtattagtattggcacatctctttggaagaagatattttccaccaaagttccaggatgcacacttcgagttttatcaatcaaaggtgttccttgatgatctccctgaggattttagtgatgctttagatgaatataacatgaaaattatggaggactttaccactttcctacgaattgtttccaaactggctgatatgaatcaggaatatcaactcccattgtcaaaaatcaaattcacaggtaaagaatgtgaagactctcaactcgtatctcatttgatgagctgcaaggaaggaagagtagcaatttcaccatttgtttgtctgtctgggaactttgatgatgatttgcttcgactagaaactccaaaccatgttactctaggcacaatcggtgtcaatcgctctcaggctccagtgctgttgtcacagaaatttgataaccgaggaaggaaaatgtcgcttaatgcctatgcactggatttctacaaacatggttccttgataggattagtccaggataacaggatgaatgaaggagatgcttattatttgttgaaggattttgcactcaccattaaatctatcagtgtttccttgcgtgagctatgtgaaaatgaagacgacaacgttgtcttagcctttgaacaactgagtacaactttttgggaaaagttaaacaaagtctaaaaacaaagtctatgcaaaccactcaaaaataattccatagtagtttttcaggtcacgtttttgattcttatgcttcttgccagaaatacattatgataaagtggaaatacattacgatgaagtggaaagagcaaacactttggaatcaaacagagttgcaatcaaacctgccatgttctgtcatgaatactcacaaattatttagtatacctgaatcttggtttctttttataactgagtaataatggttacatctcaggtagtttgaggattgactaaaaaaatgcgagaatgttgtatgtgactgaataacaatttttactctgcgaagccaaagtaaatataatattatcagtaactttatccccagtgtcagtatttataaaatgtttattaaggctagaaaaaatgaatacaatatcctgaaggtgaaatatattctcttcaattagcataaatatgatttacataagttagctatacagctattgagatagtactttctagtaaacttaaactactttttaaacatacattttgtgttgatttaacaaaaatatagagaatgatttgctttattgtaattgtatataagtgactggaaaagcacaaagaaataaagtgggttcgatctgtttaccaaaaaaaaaaaaaaaaaaaaaaaaaaaaaaaaa

SEQ ID NO: 216 - protein, 391 aa, Homo sapien
MSGRAGRRGQDLMGDVYFFDIPFPKIGKLIKSNVPELRGHFPLSITLVLRLMLLASKGDDPEDAKAKVLSVLKHSLLSFKQPRVMDMLKLYFLFSLQFLVKEGYLDQEGNPMGFAGLVSHLHYHEPSNLVFVSFLVNGLFHDLCQPTRKGSKHFSQDVMEKLVLVLAHLFGRRYFPPKFQDAHFEFYQSKVFLDDLPEDFSDALDEYNMKIMEDFTTFLRIVSKLADMNQEYQLPLSKIKFTGKECEDSQLVSHLMSCKEGRVAISPFVCLSGNFDDDLLRLETPNHVTLGTIGVNRSQAPVLLSQKFDNRGRKMSLNAYALDFYKHGSLIGLVQDNRMNEGDAYYLLKDFALTIKSISVSLRELCENEDDNVVLAFEQLSTTFWEKLNKV

SEQ ID NO: 217 - DNA, 4002 bp, Homo sapien
aatgcgcttgcgcacgtgctgtctaccagttcctgagagggacgcgtgccgcggagccaggcttactacgtgacccggacaccaggcatacgctaggggcagtcagctgtgccttctctttcggagttgttccgtgctcccacgtgcttccccttctccactggctgggatcccccgggctcggggcgcagtaataatttttcaccatgcatcggaaaaaggtggataaccgaatccggattctcattgagaatggagtagctgagcggcaaagatctctctttgttgtagttggggatcgaggaaaagatcaggtggtaatacttcatcacatgttatccaaagcaactgtgaaggctcggccttcagtgctgtggtgttataagaaagagctggggtttagcagtcaccggaagaaaagaatgcgacagctgcagaagaaaataaagaatggaacactgaacataaagcaggacgacccctttgaactcttcatagcagccacaaacattcgctactgctactacaacgagacccacaagatcctgggcaataccttcggcatgtgtgtgctgcaggattttgaagccttaactccaaacttgctggccaggactgtagaaacagtggaaggtggtgggctagtggtcatcctcctacggaccatgaactcactcaagcaattgtacacagtgactatggatgtgcattccaggtacagaactgaggcccatcaggatgtggtgggaagatttaatgaaaggtttattctgtctctggcctcttgtaagaagtgtctcgtcattgatgaccagctcaacatcctgcccatctcctcccacgttgccaccatggaggccctgcctccccagactccggatgagagtcttggtccttctgatctggagctgagggagttgaaggagagcttgcaggacacccagcctgtgggtgtgttggtggactgctgtaagactctagaccaggccaaagctgtcttgaaatttatcgagggcatctctgaaaagaccctgaggagtactgttgcactcacagctgctcgaggacggggaaaatctgcagccctgggattggcgattgctggggcggtggcatttgggtactccaatatctttgttacctccccatgccctgataacctccatactctgtttgaatttgtatttaaaggatttgatgctctgcaatatcaggaacatctggattatgagattatccagtctctaaatcctgaatttaacaaagcagtgatcagagtgaatgtatttcgagaacacaggcagactattcagtatatacatcctgcagatgctgtgaagctgggccaggctgaactagttgtgattgatgaagctgccgccatccccctccccttggtgaagagcctacttggcccctaccttgttttcatggcatccaccatcaatggctatgagggcactggccggtcactgtccctcaagctaattcagcagctccgtcaacagagcgcccagagccaggtcagcaccactgctgagaataagaccacgacgacagccagattggcatcagcgcggacactgcatgaggtttccctccaggagtcaatccgatacgcccctggggatgcagtggagaagtggctgaatgacttgctgtgcctggattgcctcaacatcactcggatagtctcaggctgccccttgcctgaagcttgtgaactgtactatgttaatagagataccctcttttgctaccacaaggcctctgaagttttcctccaacggcttatggccctctacgtggcttctcactacaagaactctcccaatgatctccagatgctctccgatgcacctgctcaccatctcttctgccttctgcctcctgtgccccccacccagaatgcccttccagaagtgcttgctgttatccaggtgtgccttgaaggggagatttctcgccagtccatcttgaacagtctgtctcgaggcaagaaggcttcaggggacctgattccatggacagtgtcagaacagttccaagatccagactttggtggtctgtctggtggaagggtcgttcgcattgctgttcacccagattatcaagggatgggctatggcagccgtgctctgcagctgctgcagatgtactatgaaggcaggtttccttgtctggaggaaaaggtccttgagacaccacaggaaattcacaccgtaagcagcgaggctgtcagcttgttggaagaggtcatcactccccggaaggacctgcctcctttactcctcaaattgaatgagaggcctgccgaacgcctggattacctgggtgtttcctatggcttgacccccaggctcctcaagttctggaaacgagctggatttgttcctgtttatctgagacagaccccgaatgacctgaccggagagcactcgtgcatcatgctgaagacgctcactgatgaggatgaggctgaccagggaggctggcttgcagccttctggaaagatttccgacggcggttcctagccttgctctcctaccagttcagtaccttctctccttccctggctctgaacatcattcagaacaggaacatggggaagccagcccagcctgccctgagccgggaggagctggaagcactcttcctcccctatgacctgaagcggctggagatgtattcacggaatatggtggactatcacctcatcatggacatgatcccggccatctctcgcatctatttcctgaaccagctgggggacctggccctgtctgcggctcagtcggctcttctcttggggattggcctgcagcataagtctgtggaccggctggaaaaggagattgagctgccctcgggccagttgatgggacttttcaaccggatcatccgcaaagttgtgaagctatttaatgaagttcaggaaaaggccattgaggagcagatggtggcagcgaaggatgtggtcatggagcccacgatgaagaccctcagtgacgacctagatgaagcagcaaaggaatttcaggagaaacacaagaaggaagtagggaagctgaagagcatggacctctctgaatacataatccgtggggacgatgaagagtggaatgaagttttgaacaaagctgggccgaacgcctcgatcatcagcctgaaaagtgacaagaaaaggaagttagaggccaaacaagaacccaaacagagcaagaagttgaagaacagagagacaaagaacaaaaaagatatgaaactgaagcggaagaaatagtgaagagaaactcgggcatctgtgtttgatcatgggaagatactctcactaactgaaccctctctggctggactgttaaaagcaacgagaggccccggcacacctggaagctggccgcgaattcggcctctgggcctgtgtgtctgtgagctcaacctggctaaaggcagagtcactcccaaatgggtctctttagaacttgatggctgggcactgccatctctagaattgccacgagtctctctcttcctgcccagtccagggccctcctttcctataagttcatattttgctttgagccagctttttagtctcattcccacacatgtggaagccacgttgcctctcgaccgcctgaggcccttaagtacatcgctttctggtggtgcccaggaggctgctgctgggccgctgggtctctctttgtggacttgtacctggagcaggaggaactccagtccgtcccggcatccatggcagcccgcggttaggtgcgccagggtttgctgatgttgtcttgtgctgttccactcttggctccagcagacccactgtcccagaaaagcctgatcctgtagtttatgtagaatgccacatctgcgtcctcaagacctgtttcatccatttgggaaaagatgttgggaaaggccactttgctcgcaggggtgaggggaaggatagagaatctatttttaataaataacattctagaaagatc

SEQ ID NO: 218 - protein, 1025 aa, Homo sapien
MHRKKVDNRIRILIENGVAERQRSLFVVVGDRGKDQVVILHHMLSKATVKARPSVLWCYKKELGFSSHRKKRMRQLQKKIKNGTLNIKQDDPFELFIAATNIRYCYYNETHKILGNTFGMCVLQDFEALTPNLLARTVETVEGGGLVVILLRTMNSLKQLYTVTMDVHSRYRTEAHQDVVGRFNERFILSLASCKKCLVIDDQLNILPISSHVATMEALPPQTPDESLGPSDLELRELKESLQDTQPVGVLVDCCKTLDQAKAVLKFIEGISEKTLRSTVALTAARGRGKSAALGLAIAGAVAFGYSNIFVTSPCPDNLHTLFEFVFKGFDALQYQEHLDYEIIQSLNPEFNKAVIRVNVFREHRQTIQYIHPADAVKLGQAELVVIDEAAAIPLPLVKSLLGPYLVFMASTINGYEGTGRSLSLKLIQQLRQQSAQSQVSTTAENKTTTTARLASARTLHEVSLQESIRYAPGDAVEKWLNDLLCLDCLNITRIVSGCPLPEACELYYVNRDTLFCYHKASEVFLQRLMALYVASHYKNSPNDLQMLSDAPAHHLFCLLPPVPPTQNALPEVLAVIQVCLEGEISRQSILNSLSRGKKASGDLIPWTVSEQFQDPDFGGLSGGRVVRIAVHPDYQGMGYGSRALQLLQMYYEGRFPCLEEKVLETPQEIHTVSSEAVSLLEEVITPRKDLPPLLLKLNERPAERLDYLGVSYGLTPRLLKFWKRAGFVPVYLRQTPNDLTGEHSCIMLKTLTDEDEADQGGWLAAFWKDFRRRFLALLSYQFSTFSPSLALNIIQNRNMGKPAQPALSREELEALFLPYDLKRLEMYSRNMVDYHLIMDMIPAISRIYFLNQLGDLALSAAQSALLLGIGLQHKSVDRLEKEIELPSGQLMGLFNRIIRKVVKLFNEVQEKAIEEQMVAAKDVVMEPTMKTLSDDLDEAAKEFQEKHKKEVGKLKSMDLSEYIIRGDDEEWNEVLNKAGPNASIISLKSDKKRKLEAKQEPKQSKKLKNRETKNKKDMKLKRKK

SEQ ID NO: 219 - DNA, 5231 bp, Homo sapien
tataaattgctttttaacttcgttgaacaaaacatgaaaatagagagactggttgaagtaaagccttccttagttattgactatttaaagacagaaaagaagctattctggccaaagataaagaaggtaaatgtgcaggtaagtttcaatcctgagaacaaacaaaaaggcattttactaactggctcaaagaccgaagtactgaaggcagtggacattgtcaagcaagtctgggattcagtctgtgttaaaagtgtccatactgataagccaggagccaagcagttcttccaggataaagcacggttttatcaaagtgagatcaaacggttgtttggttgttacattgaactacaggagaatgaagtaatgaaggagggaggcagccccgctgggcagaagtgcttctctcggacagtcttggcccctggcgttgtgctgattgtgcagcagggtgacttggcacggcttcctgtcgatgtggtggtgaatgcatctaatgaggaccttaagcattatggtggcctggccgctgcgctctcaaaagcagctggccctgagctccaggccgactgtgaccagatagtgaagagagagggcagactcctaccgggcaatgccaccatctccaaggcaggaaagctgccctaccaccacgtgatccatgcagtggggccccgctggagcggatatgaggccccgaggtgtgtgtacctattaaggagagctgtgcaactcagtctctgtctagccgaaaaatacaagtaccgatccatagccatcccagctattagttctggagtctttggctttcccttaggccgatgcgtggagaccattgtttctgccatcaaggaaaacttccaattcaagaaggatggacactgcttgaaagaaatctaccttgtggatgtatctgagaagactgttgaggcctttgcagaagctgtgaaaactgtatttaaagccaccctgccagatacagctgccccgccaggtttaccaccagcagcagcggggcctgggaaaacatcatgggaaaaaggaagcctggtgtccccgggaggcctgcagatgctgttggtgaaagagggtgtgcagaatgctaagaccgatgttgttgtcaactccgttcccttggatctcgtgcttagtagagggcctctttctaagtccctcttggaaaaagctggaccagagctccaggaggaattggacacagttggacaaggggtggctgtcagcatgggcacagtgctcaaaaccagcagctggaatctggactgtcgctatgtgcttcacgtggtagctccggagtggagaaatggtagcacatcttcactcaagataatggaagacataatcagagaatgtatggagatcactgagagcttgtccttaaaatcaattgcatttccagcaataggaacaggaaacttgggatttcctaaaaacatattcgctgaattaatcatttcagaggtgttcaaatttagtagcaagaatcagctgaaaactttacaagaggttcactttctgctgcacccgagtgatcatgaaaatattcaggcattttcagatgaatttgccagaagggctaatggaaatctcgtcagtgacaaaattccgaaggctaaagatacacaaggtttttatgggactgtttctagccctgattcaggtgtgtatgaaatgaagattggctccatcatcttccaggtggcttctggagatatcacgaaagaagaggcagatgtgattgtaaattcaacatcaaactcattcaatctcaaagcaggggtctccaaagcaattttagaatgtgctggacaaaatgtagaaagggaatgttctcagcaagctcagcagcgcaaaaatgattatataatcaccggaggtggatttttgaggtgcaagaatatcattcatgtaattggtggaaatgatgtcaagagttcagtttcctctgttttgcaggagtgtgaaaaaaaaaattactcatccatttgcctcccagccattgggacaggaaatgccaaacaacacccagataaggttgctgaagccataattgatgccattgaagactttgtccagaaaggatcagcccagtctgtgaaaaaagttaaagttgttatctttctgcctcaagtactggatgtgttttatgccaacatgaagaaaagagaagggactcagctttcttcccaacagtctgtgatgtctaaacttgcatcatttttgggcttttcaaagcaatctccccaaaaaaagaatcatttggttttggaaaagaaaacagaatcagcaacttttcgggtgtgtggtgaaaatgtcacgtgtgtggaatacgctatctcctggctacaagacctgattgaaaaagaacagtgtccttacaccagtgaagatgagtgcatcaaagactttgatgaaaaggagtatcaggagttgaatgagctgcagaagaagttaaatattaacatttccctggaccataagagacctttgattaaggttttgggaattagcagagatgtgatgcaggctagagatgaaattgaggcgatgatcaagagagttcgattggccaaagaacaggaatcccgggcagattgtatcagtgagtttatagaatggcagtataatgacaataacacttctcattgttttaacaaaatgaccaatctgaaattagaggatgcaaggagagaaaagaaaaaaacagttgatgtcaaaattaatcatcggcactacacagtgaacttgaacacatacactgccacagacacaaagggccacagtttatctgttcagcgcctcacgaaatccaaagttgacatccctgcacactggagtgatatgaagcagcagaatttctgtgtggtggagctgctgcctagtgatcctgagtacaacacggtggcaagcaagtttaatcagacctgctcacacttcagaatagagaaggtaagccttctgctagaatgcagtttctggatggtggaaataagttctgtcatggtcctatataaaatccattttcattcacttcctatcacatttttttaaacccagaattagaatttgtatggtaattagtagttctagattctactcatgtgaccataattactgaggcattaagattcttgtgtcagtgattacaatatttgattgtaatatgatagaacactaaagacatatatttactttgtgaagcaagctaatacaaattcaaagatatggctttaaaattggatttgatagctagcaaattccacagagagccatgcagaggctccttagatcaggaccatgttactctgccccattattcacagatcaacagtgcttccttgataaagccagcaggccttttctcgtttatcataattattttgggcaggtgaatgtgatgattcgtgcctgtagtcccagctattgggaggctgaggtggaaggattgcatgagcccaggagtttgacgccagtctgggtaacatagtgagatcctgctctcaaataaaaacaaccaattattttggcatcttcttccatttttaaacatttttgatattgctgtttgaaattatattttccttgacttctctagcaaaattattatgattttttttttccttgactaattttcttttcatttttgcaggcacgctgtttctcttccaaacccctaattctagctttattcacgccatttatgcttaaacggtcttttgtctctgtacctcaccagggaatatatttacccttcttggattcaactattagttcaatgtcgatagctcccaaatcaacattaccaacctgggtctttgactcaagctctagaacatactcccagtggcctaaaaaaatctccacttgaggctgggcacagtggctcacgcctgtaatcccagcactttgggaggccgaggtgggtggatcacgaggtcaggggttcaagaccatcctggtgaagatggtgaaaccacgtctctactaaaactacaaaaattagccgggcatgttggcaggtgcctataatcccacctacttgggaggctgaggcaggataattgcttgaacatgggcggcagagattgcagtgagccaagatcacgccactgcactccagcctggtcgacagagtgagactccgtctcaaaaaaaaaaatctccacttgaatatctaactgcaaaatcaacttctctaaaatctaatgcatcatacgtaagtaattctctttccctttccttcctcatttctgtttttggttctaccactttctgagtaaagccggagatctttgatccaccataagtctgccagtaagacctacattttctttgcaaatttttcttactctctatttgaactgccaacactgtttattcatgttgttaagtacatcataatttaaaaagattcaaagtgccctacaaagatataaactataccttcagataaaataaatatacaaagaaaaatggttaaagagaaaagaatggcagggaaaataagataatacagacgaactgctagttctcaaaaatatataacatgaggttaccaatttgtccctgagcttcctagtagacaaagcaagaagtaaacattcaggtacaagactcataatgtccgtaaatcaaaaagcaaaccatttgataaggaggctcacagctcctcacaatactgagactgactcctgagagatttctcttgtggatcaagtactagagaatatcctcaacgtcatcctcacaataaattaaatatcaacttttatatcactgtttttttttaatgtaaaactggttgaacaaaaccgatgcctgattgaatgaaaacaattctatgaggcaccaagacaatatgattcaagtatgcagctctatgatggtctatttctgagataacaagtaagtctcactccaagtaccaattactactaactggtagtggctgattggcacattgtgatgagatgctaagtttagattgagcaggaatgaatgttctgcttgaccagcaatatctacagtgggccctgtggatgcctgctgtgtattggcagaccctggccagagaattgatttcaacacttttttgcagtgaaaccttttttttcaataaaatcttatgtgaaatcccagtgtatgaaccagataaaagcagaggtgtgggtagtacttaaggtgcctccatggaggtccctagaattgtg

SEQ ID NO: 220 - protein, 1023 aa, Homo sapien
YKLLFNFVEQNMKIERLVEVKPSLVIDYLKTEKKLFWPKIKKVNVQVSFNPENKQKGILLTGSKTEVLKAVDIVKQVWDSVCVKSVHTDKPGAKQFFQDKARFYQSEIKRLFGCYIELQENEVMKEGGSPAGQKCFSRTVLAPGVVLIVQQGDLARLPVDVVVNASNEDLKHYGGLAAALSKAAGPELQADCDQIVKREGRLLPGNATISKAGKLPYHHVIHAVGPRWSGYEAPRCVYLLRRAVQLSLCLAEKYKYRSIAIPAISSGVFGFPLGRCVETIVSAIKENFQFKKDGHCLKEIYLVDVSEKTVEAFAEAVKTVFKATLPDTAAPPGLPPAAAGPGKTSWEKGSLVSPGGLQMLLVKEGVQNAKTDVVVNSVPLDLVLSRGPLSKSLLEKAGPELQEELDTVGQGVAVSMGTVLKTSSWNLDCRYVLHVVAPEWRNGSTSSLKIMEDIIRECMEITESLSLKSIAFPAIGTGNLGFPKNIFAELIISEVFKFSSKNQLKTLQEVHFLLHPSDHENIQAFSDEFARRANGNLVSDKIPKAKDTQGFYGTVSSPDSGVYEMKIGSIIFQVASGDITKEEADVIVNSTSNSFNLKAGVSKAILECAGQNVERECSQQAQQRKNDYIITGGGFLRCKNIIHVIGGNDVKSSVSSVLQECEKKNYSSICLPAIGTGNAKQHPDKVAEAIIDAIEDFVQKGSAQSVKKVKVVIFLPQVLDVFYANMKKREGTQLSSQQSVMSKLASFLGFSKQSPQKKNHLVLEKKTESATFRVCGENVTCVEYAISWLQDLIEKEQCPYTSEDECIKDFDEKEYQELNELQKKLNINISLDHKRPLIKVLGISRDVMQARDEIEAMIKRVRLAKEQESRADCISEFIEWQYNDNNTSHCFNKMTNLKLEDARREKKKTVDVKINHRHYTVNLNTYTATDTKGHSLSVQRLTKSKVDIPAHWSDMKQQNFCVVELLPSDPEYNTVASKFNQTCSHFRIEKVSLLLECSFWMVEISSVMVLYKIHFHSLPITFF

SEQ ID NO: 221 - DNA, 1760 bp, Homo sapien
gcgtcgggggaggacaacaaagggccgcgggcggcgggcagtggtgtcccagtctcccggtgcttccctgaggctgaggcgcccggcctcccgcccgccgcgctccagatgaagtgtgagcactgcacgcgcaaggaatgtagtaagaaaacaaaaactgatgaccaagagaatgtgtcagccgatgcaccgagtccagcccaggaaaatggagagaagggagaattccacaagttggctgatgccaagatatttttgagcgactgcctggcatgtgacagctgtatgactgcagaggaaggagtccaactttcccagcaaaatgccaaggacttcttccgcgttctgaaccttaacaagaaatgtgatacctcaaagcacaaagtgctggtagtgtctgtgtgtcctcaatctttgccttattttgctgctaaattcaacctcagtgtaactgatgcatccagaagactctgtggtttcctcaaaagtcttggggtgcactatgtatttgatacgacgatagctgcggattttagtatcctggagagtcaaaaagaattcgtgcgtcgctatcgccagcacagtgaggaggaacgcaccctgcccatgctgacctctgcctgtcctggctgggtccgatacgccgagcgggtgctgggtcgccccatcactgcccacctctgcaccgccaagtccccccagcaggtcatgggctctttggtgaaggattatttcgccagacagcagaacctgtctccagagaagattttccacgtcattgtggccccttgttatgacaagaagctggaggctcttcaggaaagccttccccctgctttgcatggctcccggggcgctgactgcgtgttaacatcagaaattagccaggcgtggtggtgcacacctgtgatcacagctactcgggaggctgcggcaagagaatcacttgaacccgggaggcagaggttacagcgagacaagattgcaccactggactccagcctgggcggcggaggtgaaattgctcaaataatggagcaaggtgacctctcagtgagagatgctgccgtcgacactctgtttggagacttgaaggaggacaaagtgacgcgtcatgatggagccagctcagacgggcacctggcacacatcttcagacatgcggccaaggagctgttcaacgaggatgtggaggaggtcacttaccgagccctgagaaacaaagacttccaagaggtcacccttgagaagaacggagaggtggtgttacgctttgctgcagcctatggctttcgaaacatccagaacatgatcctgaagcttaagaagggcaagttcccattccactttgtggaggtcctcgcctgtgctggaggatgcttaaatggcagaggccaagcccagactccagacggacatgcggataaggccctgctgcggcagatggaaggcatttacgctgacatccctgtgcggcgtccggagtccagtgcacacgtgcaggagctgtaccaggagtggctggaggggatcaactcccccaaggcccgagaggtgctgcataccacgtaccagagccaggagcgtggcacacacagcctggacatcaagtggtgaagtcaggccagggccttccagctgctcttggggccagagccaagagcctctcagtagagggaggggctgccctgagtggagtattaaagacacttaagaaaaccgctcaaaaaaaaaaaaaaaaaaaaaaaaaaaaaaaaaaa

SEQ ID NO: 222 - protein, 502 aa, Homo sapien
MKCEHCTRKECSKKTKTDDQENVSADAPSPAQENGEKGEFHKLADAKIFLSDCLACDSCMTAEEGVQLSQQNAKDFFRVLNLNKKCDTSKHKVLVVSVCPQSLPYFAAKFNLSVTDASRRLCGFLKSLGVHYVFDTTIAADFSILESQKEFVRRYRQHSEEERTLPMLTSACPGWVRYAERVLGRPITAHLCTAKSPQQVMGSLVKDYFARQQNLSPEKIFHVIVAPCYDKKLEALQESLPPALHGSRGADCVLTSEISQAWWCTPVITATREAAARESLEPGRQRLQRDKIAPLDSSLGGGGEIAQIMEQGDLSVRDAAVDTLFGDLKEDKVTRHDGASSDGHLAHIFRHAAKELFNEDVEEVTYRALRNKDFQEVTLEKNGEVVLRFAAAYGFRNIQNMILKLKKGKFPFHFVEVLACAGGCLNGRGQAQTPDGHADKALLRQMEGIYADIPVRRPESSAHVQELYQEWLEGINSPKAREVLHTTYQSQERGTHSLDIKW

SEQ ID NO: 223 - DNA, 2229 bp, Homo sapien
tttcacctcagcaaggccaggggatctgcacgttgtgttagacatggctaaagtagctgataccatcctgttcctccttgatccactagaaggctgggacagcaccggtgattactgtctttcctgcctctttgctcagggccttccgacctatacactagctgtccaggggatttctggcctcccactgaagaaacaaatagataccaggaagaagctaagtaaagcagtggagaagcgctttccgcatgacaaactcctcttgttagacactcaacaggaggcagggatgctgcttaggcagttggctaaccagaagcaacagcatcttgcttttcgagatcggcgggcctacctatttgcccatgctgttgattttgttcctagtgaagagaataacttggtgggcaccttgaaaatttcaggctatgttcgagggcagactctgaatgtcaataggttgctgcatatcgttggatatggtgatttccagatgaaacagatagatgcccccggagaccctttccctttaaatcctagaggaattaaaccccaaaaggacccagacatggcaatggagatttgtgctacggatgctgtagatgatatggaagaaggtcttaaagtcctaatgaaggcagacccttgtagacaggaatccttgcaagcagaggttatcccagatccaatggagggagagcaaacctggcccactgaggaggagctgagcgaggcaaaggatttcttgaaggaaagttctaaggtggtaaagaaggtccccaaaggaacatccagttaccaagctgaatggattttggatggtggcagccaaagtggtggggaaggagatgaatatgaatatgatgatatggaacatgaggattttatggaggaggaatctcaggatgagagtagtgaagaagaggaagaatatgaaactatgactattggggagtctgtgcatgatgatctgtatgataagaaagtagatgaagaagctgaggcaaaaatgttggagaaatataaacaagaaagactggaagagatgtttccagatgaagtggacacgccccgtgatgtggctgctcgaattcgatttcagaaatacagaggccttaagagcttccggacatctccatgggatcctaaggaaaaccttcctcaagattatgctcgaatatttcagtttcagaactttactaacactaggaaaagcatctttaaagaggttgaagaaaaagaggttgaaggagctgaggttggctggtatgtcacacttcatgtctctgaagtccccgtctcagtggtcgagtgcttcaggcaaggaacacccttgattgcattttctttactacctcatgaacagaagatgtcagtattgaatatggtggtgaggcgtgaccctggcaacactgaacctgtgaaagccaaggaggagctcatatttcactgtggattcaggcgcttccgagcctcacctttattctctcagcacactgcagcggacaaacataaattgcagagattcctgactgctgacatggccctggtggcgacagtctatgcgccaatcacttttcctcctgcatctgtgctgcttttcaagcagaaaagcaatggaatgcacagcctcattgctacaggccatcttatgtcagtagatccagacagaatggtcatcaagagagttgttctgagtggtcatcctttcaaaatttttactaagatggcagtagtacgttacatgttcttcaacagagaggatgtgctgtggtttaaaccagtggaactgagaacgaagtggggccggagaggacatatcaaggaacctttaggtacccatggccacatgaaatgcagctttgatgggaagctaaaatctcaagacacagtactgatgaacctgtataaacgagtcttccccaaatggacttatgatccatatgtaccagaaccagtaccctggctgaaaagtgagatttcttcaacagtgcctcaagggggcatggagtaatggattcaaagagattctgtcctaccggtgccagtcagtactccagggatgggaggcacaagttgtgattgggcaaagtttattttctatgtcagcctgtcagtccactgccccattttgcaagacttttttttagccttgacaaaatgtctcagttaagtataaaagtttttccactacttagtccaaaaaaaactattaaatcttaatgaaat

SEQ ID NO: 224 - protein, 656 aa, Homo sapien
MAKVADTILFLLDPLEGWDSTGDYCLSCLFAQGLPTYTLAVQGISGLPLKKQIDTRKKLSKAVEKRFPHDKLLLLDTQQEAGMLLRQLANQKQQHLAFRDRRAYLFAHAVDFVPSEENNLVGTLKISGYVRGQTLNVNRLLHIVGYGDFQMKQIDAPGDPFPLNPRGIKPQKDPDMAMEICATDAVDDMEEGLKVLMKADPCRQESLQAEVIPDPMEGEQTWPTEEELSEAKDFLKESSKVVKKVPKGTSSYQAEWILDGGSQSGGEGDEYEYDDMEHEDFMEEESQDESSEEEEEYETMTIGESVHDDLYDKKVDEEAEAKMLEKYKQERLEEMFPDEVDTPRDVAARIRFQKYRGLKSFRTSPWDPKENLPQDYARIFQFQNFTNTRKSIFKEVEEKEVEGAEVGWYVTLHVSEVPVSVVECFRQGTPLIAFSLLPHEQKMSVLNMVVRRDPGNTEPVKAKEELIFHCGFRRFRASPLFSQHTAADKHKLQRFLTADMALVATVYAPITFPPASVLLFKQKSNGMHSLIATGHLMSVDPDRMVIKRVVLSGHPFKIFTKMAVVRYMFFNREDVLWFKPVELRTKWGRRGHIKEPLGTHGHMKCSFDGKLKSQDTVLMNLYKRVFPKWTYDPYVPEPVPWLKSEISSTVPQGGME

SEQ ID NO: 225 - DNA, 3712 bp, Rattus norvegicus
ccggttcccgcggtcgcagctccagccgcctcctccgcgcagccgccgcctcagctgctcgctctgtgggtcggtcctctccggcacttgggctccagtcgcgccctccaagcccttcaggccgccccagtgtcctcctccttctccggccagacccagccccgcgaagatggtggaccgcgagcaactggtgcagaaagcccggctggccgagcaggcggagcgctacgacgacatggccgcggccatgaagaacgtgacagagctgaatgagccactgtcgaatgaggaacgaaaccttctgtctgtggcctacaagaacgttgtgggggcacgccgctcttcctggagggtcatcagtagcattgagcagaagacatctgcagacggcaatgagaagaagattgagatggtccgtgcgtaccgggagaagatagagaaggagttggaggctgtgtgccaggatgtgctgagcctgctggataactacctgatcaagaattgcagcgagacccagtacgagagcaaagtgttctacctgaagatgaaaggggactactaccgctacctggctgaagtggccaccggagagaaaagggcgacggtggtggagtcctccgagaaggcctacagcgaagcccacgagatcagcaaagagcacatgcagcccacccaccccatccgattaggcctggctcttaactactccgtcttctactatgagatccagaacgccccagagcaagcgtgccacttggccaagaccgcgttcgacgacgccatcgccgagcttgacaccctcaacgaggactcctacaaggactccacgctcatcatgcagctcctccgcgacaacctcacgctctggacgagcgaccagcaggacgacgatggcggcgaaggcaacaattaaggccccaggggaactggcagcgcacgcggatgctactactgcagtctttatttttttcccatgagttgggggtcgggtgggggagggaaagggagggatgaccttcccagggagaaacccacgacctgtcctgtctttgatcgcctctttgacatttttgccaaaataccactagtggaaagtcaggctagctgtgctggtattggaatagcagcctcacactggcgtctggactgttctgtagattcatgcaagtggagctgtctgtctctaatttaacttattgctagataatagggttttcagatgaaaagaaaacttaaagaggaatggccctcattcagtaagttctgtggttccagtaaggatttttatgtacatacgctctcgtctctcgttttgggtactttctatctcatctgtctcggctctgcatgttttccagggtgtagcctacagacatggaacagtgtaaatcccagactgacagacttagaacctgaggtctcattcatccttatggtttaggccttgccagttttccgaagtctctgattagttgacagtattaacactaaattgcagtttacagtatttctacattacagccatatgtaacatcaagccatcgattgtgtacttttcctttgctagttgtttgggctttaacatccttattcagccttatccaggttggttttgctgttgatcggtctcctaggctaaatgagaatgaaagcgacttcaggtttttggttcataggtgctcggcaggtggctgtgggatttttttttttggtccttctttcctcttaacgtaaatccaccaccaaaattattaatcctcttgagagaaacgtgaaacgccacaaaaatagagaaaattcaggtctgtatgtcatggatcgtgttggtattttcagagaacatcccgcttctgaagctgctgcagctccctcctcagggatcacactgccgtcacccactctgcactggggcgtttcctactgcgcctcgtgctggcggacgcagctgggtgcagaagctgtggggtcggagaggcgtttggagaaggtctgtggtgcagtgtgtgaaaattcaggtgctagaagcctactggtagaaaaacccaaaaggaagagctatatccttaaccattctgtccaatttcgggagccttgtcagtgtgtcagtttttcctccccgaagacactccttccccaagtaattgtaggaagataaaaaaactgttaccagataacaaacacttaactcctatttgaccagaactttttcctctcgagatagttttttctttttaatgaaaaaagcataggaattggagattggcttgtctcacgcagccagtgcacatttggaattgacggaaacaacgttgctatttccacccatttgttttcggcagccttaaggccctcattctcatttcgggtgaatctgtctatctgtgaacgtggcccgcatgtgcattcttttttttatatatataaagtcagtgacgaggcactcccgagacgtgtaatgacaccacacttgttttctttgtttctttgttttatttaggcaagaagaggtgtgagtaattgaggaaaaactgacagatgcttttgctaataccaaaattgagcttacaattaggaactgagtatgtgtaacaggatacaggtgacagtgaagatagaagaaccacgatgaccacagactcaatgtgctctgtaacatcgcacagtttacccagcatgactttccttaggaggccccctcctcacgctagagtaaaagtcccagttaagtgaagcctaccagaagaactagtagaagaagctttgccgcttttgtgcctctcacaggcgcctaaagtcattgccatgggaggaagacgatttggggggggagggggggggcagggtaggtggggctttccctaatttatcttcatgtccagtgagcagtgttgcgtttttccttgtagcatttggaaatgatttactggaattacaaaacctatttttcctttaaatttcagctttggctctggctgctttttagaataatgcaagataaaaatcacacctgagggctgaaaacggagagggaatgggagacttgatatttaagcagcttgaatggtttttcttttctttatttttaaagaaatgcacttgcctatgatactgtctctccagtgaaatgattactcctccattactctattgatacaatattgtgcatgctagtgttgtatttctatacagtagcttgaaattgattaacttatactgtaggtgttatgtattcctatgacaaaaaaaattaagtcttcaaattttttaaaggttttttttttttaatttaatttttccttttgggggtaaagtttgctctaccaaatagtgattgtaacaaattgatctgttttggatgttgctatagtgacatgcagttatatattttgtttttaaaagggggggagcaaaagaaacaccagtgttagcttaatcttaatgtctggtgtttgtcatggtgaaattataactattacagtgttggagaacaacaaatatgttctctgaatgagcctttgtgctttttgtcatgttatgcagtgaactatttttaaggtctaatcagtgattatttttccagctccgtgtttctctaaggaattatttcacacacggaccatctttagcagtttcctcagtgatggaatatcatgaatgtgagtcattatgtagctgtcgtacattgagcaaataaacttacagatctgacgcc

SEQ ID NO: 226 - protein, 247 aa, Rattus norvegicus
MVDREQLVQKARLAEQAERYDDMAAAMKNVTELNEPLSNEERNLLSVAYKNVVGARRSSWRVISSIEQKTSADGNEKKIEMVRAYREKIEKELEAVCQDVLSLLDNYLIKNCSETQYESKVFYLKMKGDYYRYLAEVATGEKRATVVESSEKAYSEAHEISKEHMQPTHPIRLGLALNYSVFYYEIQNAPEQACHLAKTAFDDAIAELDTLNEDSYKDSTLIMQLLRDNLTLWTSDQQDDDGGEGNN

SEQ ID NO: 227 - DNA, 4336 bp, Homo sapien
atccagttcacgcagtcgtcattccagtatctcacctgtcaggcttccacttaattccagtctgggagctgaactcagtaggaaaaagaaggaaagagcagctgctgctgctgcagcaaagatggatggaaaggagtccagctacgaaagaagtggctcttacagcgggcgatcgcccagtccctatggtcgaaggcggtccagcagccctttcctgagcaagcggtctctgagtcggagtccactccccagtaggaaatccatgaagtccagaagtagaagtcctgcatattcaagacattcatcttctcatagtaaaaagaagagatccagttcacgcagtcgtcattccagtatctcacctgtcaggcttccacttaattccagtctgggagctgaactcagtaggaaaaagaaggaaagagcagctgctgctgctgcagcaaagatggatggaaaggagtccaagggttcacctgtatttttgcctagaaaagagaacagttcagtagaggctaaggattcaggtttggagtctaaaaagttacccagaagtgtaaaattggaaaaatctgccccagatactgaactggtgaatgtaacacatctaaacacagaggtaaaaaattcttcagatacagggaaagtaaagttggatgagaactccgagaagcatcttgttaaagatttgaaagcacagggaacaagagactctaaacccatagcactgaaagaggagattgttactccaaaggagacagaaacatcagaaaaggagacccctccacctcttcccacaattgcttctcccccaccccctctaccaactactacccctccacctcagacaccccctttgccacctttgcctccaataccagctcttccacagcaaccacctctgcctccttctcagccagcatttagtcaggttcctgcttccagtacttcaactttgcccccttctactcactcaaagacatctgctgtgtcctctcaggcaaattctcagccccctgtacaggtttctgtgaagactcaagtatctgtaacagctgctattccacacctgaaaacttcaacgttgcctcctttgcccctcccacccttattacctggagatgatgacatggatagtccaaaagaaactcttccttcaaaacctgtgaagaaagagaaggaacagaggacacgtcacttactcacagaccttcctctccctccagagctccctggtggagatctgtctcccccagactctccagaaccaaaggcaatcacaccacctcagcaaccatataaaaagagaccaaaaatttgttgtcctcgttatggagaaagaagacaaacagaaagcgactgggggaaacgctgtgtggacaagtttgacattattgggattattggagaaggaacctatggccaagtatataaagccaaggacaaagacacaggagaactagtggctctgaagaaggtgagactagacaatgagaaagagggcttcccaatcacagccattcgtgaaatcaaaatccttcgtcagttaatccaccgaagtgttgttaacatgaaggaaattgtcacagataaacaagatgcactggatttcaagaaggacaaaggtgccttttaccttgtatttgagtatatggaccatgacttaatgggactgctagaatctggtttggtgcacttttctgaggaccatatcaagtcgttcatgaaacagctaatggaaggattggaatactgtcacaaaaagaatttcctgcatcgggatattaagtgttctaacattttgctgaataacagtgggcaaatcaaactagcagattttggacttgctcggctctataactctgaagagagtcgcccttacacaaacaaagtcattactttgtggtaccgacctccagaactactgctaggagaggaacgttacacaccagccatagatgtttggagctgtggatgtattcttggggaactattcacaaagaagcctatttttcaagccaatctggaactggctcagctagaactgatcagccgactttgtggtagcccttgtccagctgtgtggcctgatgttatcaaactgccctacttcaacaccatgaaaccgaagaagcaatatcgaaggcgtctacgagaagaattctctttcattccttctgcagcacttgatttattggaccacatgctgacactagatcctagtaagcggtgcacagctgaacagaccctacagagcgacttccttaaagatgtcgaactcagcaaaatggctcctccagacctcccccactggcaggattgccatgagttgtggagtaagaaacggcgacgtcagcgacaaagtggtgttgtagtcgaagagccacctccatccaaaacttctcgaaaagaaactacctcagggacaagtactgagcctgtgaagaacagcagcccagcaccacctcagcctgctcctggcaaggtggagtctggggctggggatgcaataggccttgctgacatcacacaacagctgaatcaaagtgaattggcagtgttattaaacctgctgcagagccaaaccgacctgagcatccctcaaatggcacagctgcttaacatccactccaacccagagatgcagcagcagctggaagccctgaaccaatccatcagtgccctgacggaagctacttcccagcagcaggactcagagaccatggccccagaggagtctttgaaggaagcaccctctgccccagtgatcctgccttcagcagaacagacgacccttgaagcttcaagcacaccagctgacatgcagaatatattggcagttctcttgagtcagctgatgaaaacccaagagccagcaggcagtctggaggaaaacaacagtgacaagaacagtgggccacaggggccccgaagaactcccacaatgccacaggaggaggcagcaggtaggagcaacggtgggaatgccctctgaggaatgcagtgatgtccatcagtcacctctcacccagagcctggcaaattcagtctctttcacagaacctaaagccaagccaggttcagtgggaaatcccacctgtccaaacactgtgtgagacaccagaattagaggcctgcaagcctgcttccttcatccccaatgcccagatgggacaggtcaccagcctcctgtgtctacccccacctttcttgcttgctggcctcctctctctgcagtgcctctctcatccctgcaatccagacagcacatgcagcagctcaaccaattccattcctggctacctcatcccctccagtctgaaaggacgtgtgaatgccaccaggatctgaacccaagattccagcctcggtcaccaccctgaccctgagaatgccactgggatggggagaacttgtcagtcttcatccttccccacaagtatactgaagccaggacagcacctgccttagagagctcttagagggattatccgcagcctgaagaaagaaggttacaactgaggaagaacttctgaacagggaagagtggaagaaaagactgcagctcagctccagaagcagacccagaatggcatccttctctgagacccagaccccagccccttttcatggaagaccagcacaaaggaggaagtaggttagggaatggtaaggctccatgtgatgggactaatgtggagaggcctggggcctttccctgaggactggatggctggagtttgggagcctgagttgacagaggaggctaagcccgggcagctactttgttccagaaatctaaggtccctggagggaggctctgctttgggagggggaagggagctaacattgcagagcaccaactgtgaaccaggtacaatggcagagcctttccatacctgtactcacaactagcgggtgaggagtcaaggcaaataggtgtctcatagctccccatatctcggcagtcgaccacctcctcttttgattctctgatgtcactgccagttctcctcctattgctctgacctgtctttctctgtgtcctttgcaaactcattctcaactccttagactcagtcaagtcccccagttacacacttccatggtactatatatcattccttcagagcacttaacacagttatttcctatgtatttgtccagtcatttgaataatgatcctagtttcattggatggaaagttccacaaggtcagtgaccatttctatctgtgttcaccaatgtgttcccagtgcccagaaacaatgcctagcataaagcagctgttttgtaaatacttgttcaatgaatgaataaatgacaaaagaacatc

SEQ ID NO: 228 - protein, 997 aa, Homo sapien
SSSRSRHSSISPVRLPLNSSLGAELSRKKKERAAAAAAAKMDGKESSYERSGSYSGRSPSPYGRRRSSSPFLSKRSLSRSPLPSRKSMKSRSRSPAYSRHSSSHSKKKRSSSRSRHSSISPVRLPLNSSLGAELSRKKKERAAAAAAAKMDGKESKGSPVFLPRKENSSVEAKDSGLESKKLPRSVKLEKSAPDTELVNVTHLNTEVKNSSDTGKVKLDENSEKHLVKDLKAQGTRDSKPIALKEEIVTPKETETSEKETPPPLPTIASPPPPLPTTTPPPQTPPLPPLPPIPALPQQPPLPPSQPAFSQVPASSTSTLPPSTHSKTSAVSSQANSQPPVQVSVKTQVSVTAAIPHLKTSTLPPLPLPPLLPGDDDMDSPKETLPSKPVKKEKEQRTRHLLTDLPLPPELPGGDLSPPDSPEPKAITPPQQPYKKRPKICCPRYGERRQTESDWGKRCVDKFDIIGIIGEGTYGQVYKAKDKDTGELVALKKVRLDNEKEGFPITAIREIKILRQLIHRSVVNMKEIVTDKQDALDFKKDKGAFYLVFEYMDHDLMGLLESGLVHFSEDHIKSFMKQLMEGLEYCHKKNFLHRDIKCSNILLNNSGQIKLADFGLARLYNSEESRPYTNKVITLWYRPPELLLGEERYTPAIDVWSCGCILGELFTKKPIFQANLELAQLELISRLCGSPCPAVWPDVIKLPYFNTMKPKKQYRRRLREEFSFIPSAALDLLDHMLTLDPSKRCTAEQTLQSDFLKDVELSKMAPPDLPHWQDCHELWSKKRRRQRQSGVVVEEPPPSKTSRKETTSGTSTEPVKNSSPAPPQPAPGKVESGAGDAIGLADITQQLNQSELAVLLNLLQSQTDLSIPQMAQLLNIHSNPEMQQQLEALNQSISALTEATSQQQDSETMAPEESLKEAPSAPVILPSAEQTTLEASSTPADMQNILAVLLSQLMKTQEPAGSLEENNSDKNSGPQGPRRTPTMPQEEAAGRSNGGNAL

SEQ ID NO: 229 - DNA, 2473 bp, Homo sapien
aatcgcgaaacccggcgagcggcgcgctggctatcgagcgagcggggcggaaccgggagttgcgccgccgctcgggcgccgggctccgtcgcggccgcagccccgcgggtcgccctcccgtgcctcgcccgcggacaccctggccgtggacaccctggccgtgggcacccgcggggcgcggcgcgggcgctgcgcggcggcggcggcggcatgaaggtcacgtcgctcgacgggcgccagctgcgcaagatgctccgcaaggaggcggcggcgcgctgcgtggtgctcgactgccggccctatctggccttcgctgcctcgaacgtgcgcggctcgctcaacgtcaacctcaactcggtggtgctgcggcgggcccggggcggcgcggtgtcggcgcgctacgtgctgcccgacgaggcggcgcgcgcgcggctcctgcaggagggcggcggcggcgtcgcggccgtggtggtgctggaccagggcagccgccactggcagaagctgcgagaggagagcgccgcgcgtgtcgtcctcacctcgctactcgcttgcctacccgccggcccgcgggtctacttcctcaaagggggatatgagactttctactcggaatatcctgagtgttgcgtggatgtaaaacccatttcacaagagaagattgagagtgagagagccctcatcagccagtgtggaaaaccagtggtaaatgtcagctacaggccagcttatgaccagggtggcccagttgaaatccttcccttcctctaccttggaagtgcctaccatgcatccaagtgcgagttcctcgccaacttgcacatcacagccctgctgaatgtctcccgacggacctccgaggcctgcatgacccacctacactacaaatggatccctgtggaagacagccacacggctgacattagctcccactttcaagaagcaatagacttcattgactgtgtcagggaaaagggaggcaaggtcctggtccactgtgaggctgggatctcccgttcacccaccatctgcatggcttaccttatgaagaccaagcagttccgcctgaaggaggccttcgattacatcaagcagaggaggagcatggtctcgcccaactttggcttcatgggccagctcctgcagtacgaatctgagatcctgccctccacgcccaacccccagcctccctcctgccaaggggaggcagcaggctcttcactgataggccatttgcagacactgagccctgacatgcagggtgcctactgcacattccctgcctcggtgctggcaccggtgcctacccactcaacagtctcagagctcagcagaagccctgtggcaacggccacatcctgctaaaactgggatggaggaatcggcccagccccaagagcaactgtgatttttgtttttaagactcatggacatttcatacctgtgcaatactgaagacctcattctgtcatgctgccccagtgagatagtgagtggtcaccaggcttgcaaatgaacttcagacggacctcagggtaggttctcgggactgaaggaaggccaagccattacgggagcacagcatgtgctgactactgtacttccagacccctgccctcttgggactgcccagtccttgcacctcagagttcgccttttcatttcaagcataagccaataaatacctgcagcaacgtgggagaaagaagttgctggaccaggagaaaaggcagttatgaagccaattcattttgaaggaagcacaatttccaccttattttttgaactttggcagtttcaatgtctgtctctgttgcttcggggcataagctgatcaccgtctagttgggaaagtcaccctacagggtttgtagggacatgatcagcatcctgatttgaaccctgaaatgttgtgtagacaccctcttgggtccaatgaggtagttggttgaagtagcaagatgttggcttttctggattttttttgccatgggttcttcactgaccttggactttggcatgattcttagtcatacttgaacttgtctcattccacctcttctcagagcaactcttcctttgggaaaagagttcttcagatcatagaccaaaaaagtcataccttcgaggtggtagcagtagattccaggaggagaagggtacttgctaggtatcctgggtcagtggcggtgcaaactggtttcctcagctgcctgtccttctgtgtgcttatgtctcttgtgacaattgttttcctccctgcccctggaggttgtcttcaactgtggacttctgggatttgcagattttgcaacgtggtactacttttttttctttttgtctgttagttatttctccaggggaaaaggcaataattttctaagacccgtgtgaatgtgaagaaaagcagtatgttactggttgttgttgttgttcttgttttttatatgtaaaataaaaatagtgaaaggag

SEQ ID NO: 230 - protein, 384 aa, Homo sapien
MKVTSLDGRQLRKMLRKEAAARCVVLDCRPYLAFAASNVRGSLNVNLNSVVLRRARGGAVSARYVLPDEAARARLLQEGGGGVAAVVVLDQGSRHWQKLREESAARVVLTSLLACLPAGPRVYFLKGGYETFYSEYPECCVDVKPISQEKIESERALISQCGKPVVNVSYRPAYDQGGPVEILPFLYLGSAYHASKCEFLANLHITALLNVSRRTSEACMTHLHYKWIPVEDSHTADISSHFQEAIDFIDCVREKGGKVLVHCEAGISRSPTICMAYLMKTKQFRLKEAFDYIKQRRSMVSPNFGFMGQLLQYESEILPSTPNPQPPSCQGEAAGSSLIGHLQTLSPDMQGAYCTFPASVLAPVPTHSTVSELSRSPVATATSC

SEQ ID NO: 231 - DNA, 1330 bp, Mus musculus
gcagcccagccaagcactgtcaggaatcctgtgaagcagctccagctatgtgtgaagaagaggacagcactgccttggtgtgtgacaatggctctgggctctgtaaggccggctttgctggggacgatgctcccagggctgttttcccatccattgtgggacgtcccagacatcagggggtgatggtgggaatgggacaaaaagacagctacgtgggtgacgaagcacagagcaaaagaggaatcctgaccctgaagtacccgatagaacatggcatcatcaccaactgggacgacatggaaaagatctggcaccactctttctacaatgagcttcgtgttgcccctgaagagcatcccaccctgctcacggaggcacccctgaaccccaaggccaaccgggagaaaatgactcaaattatgtttgagactttcaatgtcccagccatgtatgtggctatccaggcggtgctgtctctctatgcctctggacgcacaactggcatcgtgctggactctggagatggtgtcacccacaatgtccccatctatgagggctatgccttgccccatgccatcatgcgtctggatctggctggccgagatctcactgactacctcatgaagatcctgactgagcgtggctattccttcgttactactgctgagcgtgagattgtccgggacatcaaggagaaactgtgttatgtagctctggactttgaaaatgagatggccactgccgcatcctcatcctcccttgagaagagttacgagttgcctgatgggcaagtgatcaccatcggaaatgaacgtttccgctgcccagagaccctgttccagccatccttcatcgggatggagtctgctggcatccatgaaaccacctacaacagcatcatgaagtgtgatattgacatcaggaaggacctctatgctaacaatgtcctatcagggggcaccactatgtaccctggcattgccgaccgaatgcagaaggagatcacggccctagcacccagcaccatgaagatcaagatcattgcccctccggagcgcaaatactctgtctggatcggtggctccatcctggcctctctgtccaccttccagcagatgtggatcagcaaacaggaatacgatgaagccgggccttccattgtccaccgcaaatgcttctaaaacactttcctgctcctctctgtctctagcacacaactgtgaatgtcctgtggaattatgccttcagttcttttccaaatcattcctagccaaagctctgactcgttacctatgtgttttttaataaatctgaaataggctactggtaa

SEQ ID NO: 232 - protein, 377 aa, Mus musculus
MCEEEDSTALVCDNGSGLCKAGFAGDDAPRAVFPSIVGRPRHQGVMVGMGQKDSYVGDEAQSKRGILTLKYPIEHGIITNWDDMEKIWHHSFYNELRVAPEEHPTLLTEAPLNPKANREKMTQIMFETFNVPAMYVAIQAVLSLYASGRTTGIVLDSGDGVTHNVPIYEGYALPHAIMRLDLAGRDLTDYLMKILTERGYSFVTTAEREIVRDIKEKLCYVALDFENEMATAASSSSLEKSYELPDGQVITIGNERFRCPETLFQPSFIGMESAGIHETTYNSIMKCDIDIRKDLYANNVLSGGTTMYPGIADRMQKEITALAPSTMKIKIIAPPERKYSVWIGGSILASLSTFQQMWISKQEYDEAGPSIVHRKCF

SEQ ID NO: 233 - DNA, 1894 bp, Homo sapien
cgggaagcgcggcggggcctccagaccggggcgggcttaagggtgacatctgcgctttaaagggtccgggtcagctgactcccgactctgtggagtctagctgccagggtcgcggcagtgcggggagagatgactggggagcgacccagcacggcgctcccggacagacgctgggggccgcggattctgggcttctggggaggctgtagggtttgggtgtttgccgcgatcttcctgctgctgtctctggcagcctcctggtccaaggctgagaacgacttcggtctggtgcagccgctggtgaccatggagcaactgctgtgggtgagcgggagacagatcggctcagtggacaccttccgcatcccgctcatcacagccactccgcggggcactcttctcgcctttgctgaggcgaggaaaatgtcctcatccgatgagggggccaagttcatcgccctgcggaggtccatggaccagggcagcacatggtctcctacagcgttcattgtcaatgatggggatgtccccgatgggctgaaccttggggcagtagtgagcgatgttgagacaggagtagtatttcttttctactccctttgtgctcacaaggccggctgccaggtggcctctaccatgttggtatggagcaaggatgatggtgtttcctggagcacaccccggaatctctccctggatattggcactgaagtgtttgcccctggaccgggctctggtattcagaaacagcgggagccacggaagggccgcctcatcgtgtgtggccatgggacgctggagcgggacggagtcttctgtctcctcagcgatgatcatggtgcctcctggcgctacggaagtggggtcagcggcatcccctacggtcagcccaagcaggaaaatgatttcaatcctgatgaatgccagccctatgagctcccagatggctcagtcgtcatcaatgcccgaaaccagaacaactaccactgccactgccgaattgtcctccgcagctatgatgcctgtgatacactaaggccccgtgatgtgaccttcgaccctgagctcgtggaccctgtggtagctgcaggagctgtagtcaccagctccggcattgtcttcttctccaacccagcacatccagagttccgagtgaacctgaccctgcgatggagcttcagcaatggtacctcatggcggaaagagacagtccagctatggccaggccccagtggctattcatccctggcaaccctggagggcagcatggatggagaggagcaggccccccagctctacgtcctgtatgagaaaggccggaaccactacacagagagcatctccgtggccaaaatcagtgtctatgggacactctgagctgtgccactgccacaggggtattctgccttcaggactctgccttcaggaacacgggtctgtagagggtctgctggagacgcctgaaagacagttccatcttcctttagactccagccttggcaaaatcaccttccctttaccagggaaatcacttcctttaggactgaaagctaggcgtcctctcccacaaaaaagtcctgccctcatctgagaatactgtctttccatatggctaagtgtggccccaccaccctctctgcctcccgggacattgattggtcctgtcttgggcaggtctagtgagctgtagaattgaatcaatgtgaactcagggaactggggaaggctgagcctcctctttggtgttgcggtaagataaccgacagggctggtgaaagtccccagatggcaggatatttggtttcagagtaaggactaggtgcaccaccatgactgactatcaatcaaaatgtttgtaacttaaaatttttaatgaaggataatgaatatttta

SEQ ID NO: 234 - protein, 415 aa, Homo sapien
MTGERPSTALPDRRWGPRILGFWGGCRVWVFAAIFLLLSLAASWSKAENDFGLVQPLVTMEQLLWVSGRQIGSVDTFRIPLITATPRGTLLAFAEARKMSSSDEGAKFIALRRSMDQGSTWSPTAFIVNDGDVPDGLNLGAVVSDVETGVVFLFYSLCAHKAGCQVASTMLVWSKDDGVSWSTPRNLSLDIGTEVFAPGPGSGIQKQREPRKGRLIVCGHGTLERDGVFCLLSDDHGASWRYGSGVSGIPYGQPKQENDFNPDECQPYELPDGSVVINARNQNNYHCHCRIVLRSYDACDTLRPRDVTFDPELVDPVVAAGAVVTSSGIVFFSNPAHPEFRVNLTLRWSFSNGTSWRKETVQLWPGPSGYSSLATLEGSMDGEEQAPQLYVLYEKGRNHYTESISVAKISVYGTL

SEQ ID NO: 235 - DNA, 1129 bp, Homo sapien
gctcgtgggttttccgtgaagtcgcggtgcagcggtgggcggcatgtctgtggccggtggggagattcgtggggacacggggggagaggacactgctgctcccggccggttcagcttcagcccggagcccacgctcgaggacatccgccgcctccatgctgagtttgctgcggaacgagactgggaacagttccatcagcctcggaatctcctcctggccttggttggggaagtgggggagctggcagaactctttcagtggaaaaccgatggggaacctggcccccaaggctggtcccccagggaacgggcagcccttcaagaggagcttagtgacgtcctcatctacctggtggcattagcagcccgctgccgtgtggatctgccgctagcagtgctctccaaaatggacatcaaccggcgacgctacccagcccatctggcccgcagctcttcccgcaagtatacagaattgccccatggggccatctctgaagaccaggctgtggggcctgcggacattccctgtgactccacaggccagacctcaacctagaaagatggccacaggacttgcaactcagggtggtgtctgaagagcagagagtggcctggccctggagcctttttctagtcttttcagaatagatcatgggcctgaggcctccacttcttgaggtctgaggcccagcagcctctagaaggtagcctcctggtgtttgttctcccagtaaaatggttttgggcgataacttctagattattcctggatggccagggaggctctctgtctcagcaggtgatgacgggggtaccaggggtgcctctgagacccattctcgtgtttccctgttgtaccttttgcctgcagggcagagagatctggtttctagcaaattcccagtaggatgtcatgtaagttccttccccctcttagagattgaaggctgtaagagtccagatggtggagccaggctgtctgggttcaaatgccatctttgacacttgcaagctaaatgacattactcaaattaatcgttctgcacttcagcttccttgtctatcaaataaaaagaatagtacctgcaaaaaaaaaaaaaaaaaaaaaaaaaaaaaaaaaaaaaaaaaa

SEQ ID NO: 236 - protein, 170 aa, Homo sapien
MSVAGGEIRGDTGGEDTAAPGRFSFSPEPTLEDIRRLHAEFAAERDWEQFHQPRNLLLALVGEVGELAELFQWKTDGEPGPQGWSPRERAALQEELSDVLIYLVALAARCRVDLPLAVLSKMDINRRRYPAHLARSSSRKYTELPHGAISEDQAVGPADIPCDSTGQTST

SEQ ID NO: 237 - DNA, 983 bp, Homo sapien
gtggaattcatggcatctacttcgtatgactattgcagagtgcccatggaagacggggataagcgctgtaagcttctgctggggataggaattctggtgctcctgatcatcgtgattctgggggtgcccttgattatcttcaccatcaaggccaacagcgaggcctgccgggacggccttcgggcagtgatggagtgtcgcaatgtcacccatctcctgcaacaagagctgaccgaggcccagaagggctttcaggatgtggaggcccaggccgccacctgcaaccacactgtgatggccctaatggcttccctggatgcagagaaggcccaaggacaaaagaaagtggaggagcttgagggagagatcactacattaaaccataagcttcaggacgcgtctgcagaggtggagcgactgagaagagaaaaccaggtcttaagcgtgagaatcgcggacaagaagtactaccccagctcccaggactccagctccgctgcggcgccccagctgctgattgtgctgctgggcctcagcgctctgctgcagtgagatcccaggaagctggcacatcttggaaggtccgtcctgctcggcttttcgcttgaacattcccttgatctcatcagttctgagcgggtcatggggcaacacggttagcggggagagcacggggtagccggagaagggcctctggagcaggtctggaggggccatggggcagtcctgggtgtggggacacagtcgggttgacccagggctgtctccctccagagcctccctccggacaatgagtcccccctcttgtctcccaccctgagattgggcatggggtgcggtgtggggggcatgtgctgcctgttgttatgggttttttttgcggggggggttgcttttttctggggtctttgagctccaaaaaataaacacttcctttgagggagagcaaaaaaaaaaaaaaaaaaaaaaaaaaaaaaaaaaaa

SEQ ID NO: 238 - protein, 180 aa, Homo sapien
MASTSYDYCRVPMEDGDKRCKLLLGIGILVLLIIVILGVPLIIFTIKANSEACRDGLRAVMECRNVTHLLQQELTEAQKGFQDVEAQAATCNHTVMALMASLDAEKAQGQKKVEELEGEITTLNHKLQDASAEVERLRRENQVLSVRIADKKYYPSSQDSSSAAAPQLLIVLLGLSALLQ

SEQ ID NO: 239 - DNA, 330 bp, Homo sapien
atggcggcctcagcagcgcgaggtgctgcggcgctgcgtagaagtatcaatcagccggttgcttttgtgagaagaattccttggactgcggcgtcgagtcagctgaaagaacactttgcacagttcggccatgtcagaaggtgcattttaccttttgacaaggagactggctttcacagaggtttgggttgggttcagttttcttcagaagaaggacttcggaatgcactacaacaggaaaatcatattatagatggagtaaaggtccaggttcacactagaaggccaaaacttccgcaaacatctgatgatgaaaagaaagatttttga

SEQ ID NO: 240 - protein, 109 aa, Homo sapien
MAASAARGAAALRRSINQPVAFVRRIPWTAASSQLKEHFAQFGHVRRCILPFDKETGFHRGLGWVQFSSEEGLRNALQQENHIIDGVKVQVHTRRPKLPQTSDDEKKDF

SEQ ID NO: 241 - DNA, 2147 bp, Homo sapien
ggctcttttaaatgaccccaggcgtcgtgtattgaatcctagactcacgtccgtctcgccggcgcccgagccagtccgcgcgcaccgcgtctgcgtccccgaaagccccgcccgcaagggctgccctgcctacctggtctccgacgtgctcgtctggagggcggtgcgaggggccgagccgacgagatgttcttgctgcctcttccggctgcggggcgagtagtcgtccgacgtctggccgtagtacgttctgggagccggagtctctccaccgcagacatgacgaagggccttgttttaggaatctattccaaagaaaaagaagatgatgtgccacagttcacaagtgcaggagagaattttgataaattgttagctggaaagctgagagagactttgaacatatctggaccacctctgaaggcagggaagactcgaaccttttatggtctgcatcaggacttccccagcgtggtgctagttggcctcggcaaaaaggcagctggaatcgacgaacaggaaaactggcatgaaggcaaagaaaacatcagagctgctgttgcagcggggtgcaggcagattcaagacctggagctctcgtctgtggaggtggatccctgtggagacgctcaggctgctgcggagggagcggtgcttggtctctatgaatacgatgacctaaagcaaaaaaagaagatggctgtgtcggcaaagctctatggaagtggggatcaggaggcctggcagaaaggagtcctgtttgcttctgggcagaacttggcacgccaattgatggagacgccagccaatgagatgacgccaaccagatttgccgaaattattgagaagaatctcaaaagtgctagtagtaaaaccgaggtccatatcagacccaagtcttggattgaggaacaggcaatgggatcattcctcagtgtggccaaaggatctgacgagcccccagtcttcttggaaattcactacaaaggcagccccaatgcaaacgaaccacccctggtgtttgttgggaaaggaattacctttgacagtggtggtatctccatcaaggcttctgcaaatatggacctcatgagggctgacatgggaggagctgcaactatatgctcagccatcgtgtctgctgcaaagttaaatttgcccattaatattataggtctggcccctctttgtgaaaatatgcccagcggcaaggccaacaagccgggggatgttgttagagccaaaaacgggaagaccatccaggttgataacactgatgctgaggggaggctcatactggctgatgcgctctgttacgcacacacgtttaacccgaaggtcatcctcaatgccgccaccttaacaggtgccatggatgtagctttgggatcaggtgccactggggtctttaccaattcatcctggctctggaacaaactcttcgaggccagcattgaaacaggggaccgtgtctggaggatgcctctcttcgaacattatacaagacaggttgtagattgccagcttgctgatgttaacaacattggaaaatacagatctgcaggagcatgtacagctgcagcattcctgaaagaattcgtaactcatcctaagtgggcacatttagacatagcaggcgtgatgaccaacaaagatgaagttccctatctacggaaaggcatgactgggaggcccacaaggactctcattgagttcttacttcgtttcagtcaagacaatgcttagttcagatactcaaaaatgtcttcactctgtcttaaattggacagttgaacttaaaaggtttttgaataaatggatgaaaatcttttaacggagacaaaggatggtatttaaaaatgtagaacacaatgaaatttgtatgccttgatttttttttcatttcacacaaagatttataaaggtaaagttaatatcttacttgataaggatttttaagatactctataaatgattaaaatttttagaacttcctaatcacttttcagagtatatgtttttcattgagaagcaaaattgtaactcagatttgtgatgctaggaacatgagcaaactgaaaattactatgcacttgtcagaaacaataaatgcaacttgttgtgaaaaaaaaaaaaaaaaaaaaaaa

SEQ ID NO: 242 - protein, 519 aa, Homo sapien
MFLLPLPAAGRVVVRRLAVVRSGSRSLSTADMTKGLVLGIYSKEKEDDVPQFTSAGENFDKLLAGKLRETLNISGPPLKAGKTRTFYGLHQDFPSVVLVGLGKKAAGIDEQENWHEGKENIRAAVAAGCRQIQDLELSSVEVDPCGDAQAAAEGAVLGLYEYDDLKQKKKMAVSAKLYGSGDQEAWQKGVLFASGQNLARQLMETPANEMTPTRFAEIIEKNLKSASSKTEVHIRPKSWIEEQAMGSFLSVAKGSDEPPVFLEIHYKGSPNANEPPLVFVGKGITFDSGGISIKASANMDLMRADMGGAATICSAIVSAAKLNLPINIIGLAPLCENMPSGKANKPGDVVRAKNGKTIQVDNTDAEGRLILADALCYAHTFNPKVILNAATLTGAMDVALGSGATGVFTNSSWLWNKLFEASIETGDRVWRMPLFEHYTRQVVDCQLADVNNIGKYRSAGACTAAAFLKEFVTHPKWAHLDIAGVMTNKDEVPYLRKGMTGRPTRTLIEFLLRFSQDNA

SEQ ID NO: 243 - DNA, 1021 bp, Homo sapien
ccgctgttatacgtcacttccacggctcagcgtcagggaggagagagaatgtcttttcgaggcggaggtcgtggaggctttaatcgaggtggtggaggtggcggcttcaaccgaggcggcagcagcaaccacttccgaggtggaggcggcggtggaggcggcggcaatttcagaggcggcggcaggggaggatttggacgagggggtggccgcggaggctttaacaaaggccaagaccaaggacctccagaacgtgtagtcttattaggagagttcctgcatccctgtgaagatgacatagtttgtaaatgtaccacagatgaaaataaggtgccttatttcaatgctcctgtttacttagaaaacaaagaacaaattggaaaagtggatgaaatatttggacaactcagagatttttatttttcagttaagttgtcagaaaacatgaaggcttcatcctttaaaaaactacagaagttttatatagacccatataagctgctgccactgcagaggtttttacctcgacctccaggtgagaaaggacctccaagaggtggtggcaggggaggccgaggaggaggaagaggaggaggtggcagaggtggtggcagaggcggtggttttagaggtggaagaggaggtggaggtgggggcttcagaggaggaagaggtggtggtttcagagggagaggacattaagtgaaacagttgacagacatcaccagttgacttctgcattaacctgcatgatctgtttctactatggattggaaacttgtttcttgaacaagtcttgaagatcttggtcattttatgacaatggatctaaaatgtcagcatcatgcaaagtgcaacggaatagtgaattttgctctaaaagagcatgaacaagtctttctaatgttttgtacagtgcctggcactctgtgggtgctcaataaatggataggagttttcatttgaagcatatttgaatttttaaaataaagtgttttattcccttaaaaaaaaaaaaaaa

SEQ ID NO: 244 - protein, 217 aa, Homo sapien
MSFRGGGRGGFNRGGGGGGFNRGGSSNHFRGGGGGGGGGNFRGGGRGGFGRGGGRGGFNKGQDQGPPERVVLLGEFLHPCEDDIVCKCTTDENKVPYFNAPVYLENKEQIGKVDEIFGQLRDFYFSVKLSENMKASSFKKLQKFYIDPYKLLPLQRFLPRPPGEKGPPRGGGRGGRGGGRGGGGRGGGRGGGFRGGRGGGGGGFRGGRGGGFRGRGH

SEQ ID NO: 245 - DNA, 1807 bp, Homo sapien
ctggaaggagtcatggcggatggtcaggtggcggaactgctgctccggcggctggaggcgtctgatggcggcctggacagcgccgagttggcggctgagctgggcatggagcaccaggcggtggtgggcgccgtgaagagccttcaggcgctgggcgaggtcatcgaggctgaacttcggtccaccaagcactgggagcttactgcggagggcgaggagattgcccgggagggcagccatgaggcccgtgtgtttcgaagcattcccccagagggcctggcccagagcgagcttatgcgactgcccagtggcaaagtgggcttcagcaaggccatgtccaacaagtggattcgggtggacaagagtgcggctgacgggccccgggtgttccgagtggtggacagcatggaggatgaggtgcagcggcggctccagctggtccgggggggacaggctgagaagctgggggagaaggagaggagcgagctgaggaagaggaagctgttggctgaagtgactctgaagacctactgggtgagcaaaggcagtgcctttagtaccagcatctccaagcaagagacagagctgagcccagagatgatctccagtggctcttggcgggaccggcccttcaagccctacaacttcttggcccacggtgtcctccccgacagcggccaccttcacccgctgctcaaggtccgctcccagttccgacagatcttcctggagatggggttcaccgagatgccgactgataacttcattgagagctccttctggaactttgacgccctcttccagccccagcagcacccagcccgtgaccagcacgacaccttcttccttcgagatccagcggaggccctgcagctcccaatggactatgtccagcgggtcaagcggacccactctcagggcggctacggctcacaggggtacaagtataactggaagctggacgaggcccggaaaaacctactgcgaacccacaccacatcagccagcgcccgtgcgctctaccgccttgcccagaagaagcccttcactccggtcaagtacttctccatcgaccgcgtattccggaatgagaccctggacgccacgcacctggctgagttccaccagatcgagggcgtggtggcggatcatggtctcaccttgggccacctcatgggcgttctgcgggagttcttcaccaagctgggtatcacgcaactccgcttcaagccagcctacaacccatacacagagcccagcatggaggtgttcagctaccaccaaggcctgaagaagtgggtggaggtcggaaactcgggggtcttccgtccagagatgctgctgcccatggggcttcccgagaacgtgtcggtcattgcctggggcctctccctggagcgcccaacgatgatcaaatatggcatcaacaatatccgggagctggtgggccacaaggtgaacctgcagatggtgtatgacagtcccctgtgccgcctggatgccgagccgaggccccctcccacacaggaggctgcgtgacatgggccactctaggacaggtcatcctccccgagtccctgctgctgcgctcctttgcatccctggccagtgaccttgtatttatgaggctctgtgaggccagcccccaccttcctctttcccacctgtcccaggaccagaatcccagggacagaggactgggtagcaggttccttctgttgtcctgtgtggtgtgtctactgtgagggtgggccctgaggagacctgtgggccacctattgtctaataaagtgggcagttgccccca

SEQ ID NO: 246 - protein, 508 aa, Homo sapien
MADGQVAELLLRRLEASDGGLDSAELAAELGMEHQAVVGAVKSLQALGEVIEAELRSTKHWELTAEGEEIAREGSHEARVFRSIPPEGLAQSELMRLPSGKVGFSKAMSNKWIRVDKSAADGPRVFRVVDSMEDEVQRRLQLVRGGQAEKLGEKERSELRKRKLLAEVTLKTYWVSKGSAFSTSISKQETELSPEMISSGSWRDRPFKPYNFLAHGVLPDSGHLHPLLKVRSQFRQIFLEMGFTEMPTDNFIESSFWNFDALFQPQQHPARDQHDTFFLRDPAEALQLPMDYVQRVKRTHSQGGYGSQGYKYNWKLDEARKNLLRTHTTSASARALYRLAQKKPFTPVKYFSIDRVFRNETLDATHLAEFHQIEGVVADHGLTLGHLMGVLREFFTKLGITQLRFKPAYNPYTEPSMEVFSYHQGLKKWVEVGNSGVFRPEMLLPMGLPENVSVIAWGLSLERPTMIKYGINNIRELVGHKVNLQMVYDSPLCRLDAEPRPPPTQEAA

SEQ ID NO: 247 - DNA, 650 bp, Homo sapien
ctatctgaaatgcagagattaagccaaatacctgatgtattgtgaaagccactgattttaagaatggagagaaagggattttttactgcatccctctgtatgaatatgaaatcagagaccagggcatgatgttgctaggattagagcctctcagtctggcctcttcacccaagtgcaagaactcagtctcttactgttcaaagaaagaatcttaacagttgaattatggagggaaattcccttttgccccaagcgtttctatatttaaagcaatatcccaggagaatatgtcagacttaggatgataccttcagccacttgaagaagaaatagaaggcgctcattccaatatagtctttatttcccattcagatacaggttgagcatccctaatctgaacagttaaaacccccaaatgccccaaaatccaaaccttcctgaacgctatgacaccatgagtggaaaattccacacctaacaaacacatttgctttcttatggttcaatgtacacaaactgttttatatagaaaatgatttcaaatatcataaaattaccttcaggctatgtgcataaagtatatatgagccataaatgaattttgtgtttagactttgtgtccatccccaagatctctcattatatatata

SEQ ID NO: 248 - protein, 17 aa, Homo sapien
MNFVFRLCVHPQDLSLY

SEQ ID NO: 249 - DNA, 2693 bp, Homo sapien
cgaaaaaagaggggaagagtattaaagaccatttctggctgggcagggcactctcagcagctcaactgcccagcgtgaccagtggccacctctgcagtgtcttccacaacctggtcttgactcgtctgctgaacaaatcctctgacctcaggccggctgtgaacgtagttcctgagagatagcaaacatgcccaacagtgagcccgcatctctgctggagctgttcaacagcatcgccacacaaggggagctcgtaaggtccctcaaagcgggaaatgcgtcaaaggatgaaattgattctgcagtaaagatgttggtgtcattaaaaatgagctacaaagctgccgcgggggaggattacaaggctgactgtcctccagggaacccagcacctaccagtaatcatggcccagatgccacagaagctgaagaggattttgtggacccatggacagtacagacaagcagtgcaaaaggcatagactacgataagctcattgttcggtttggaagtagtaaaattgacaaagagctaataaaccgaatagagagagccaccggccaaagaccacaccacttcctgcgcagaggcatcttcttctcacacagagatatgaatcaggttcttgatgcctatgaaaataagaagccattttatctgtacacgggccggggcccctcttctgaagcaatgcatgtaggtcacctcattccatttattttcacaaagtggctccaggatgtatttaacgtgcccttggtcatccagatgacggatgacgagaagtatctgtggaaggacctgaccctggaccaggcctatggcgatgctgttgagaatgccaaggacatcatcgcctgtggctttgacatcaacaagactttcatattctctgacctggactacatggggatgagctcaggtttctacaaaaatgtggtgaagattcaaaagcatgttaccttcaaccaagtgaaaggcattttcggcttcactgacagcgactgcattgggaagatcagttttcctgccatccaggctgctccctccttcagcaactcattcccacagatcttccgagacaggacggatatccagtgccttatcccatgtgccattgaccaggatccttactttagaatgacaagggacgtcgcccccaggatcggctatcctaaaccagccctgttgcactccaccttcttcccagccctgcagggcgcccagaccaaaatgagtgccagcgacccaaactcctccatcttcctcaccgacacggccaagcagatcaaaaccaaggtcaataagcatgcgttttctggagggagagacaccatcgaggagcacaggcagtttgggggcaactgtgatgtggacgtgtctttcatgtacctgaccttcttcctcgaggacgacgacaagctcgagcagatcaggaaggattacaccagcggagccatgctcaccggtgagctcaagaaggcactcatagaggttctgcagcccttgatcgcagagcaccaggcccggcgcaaggaggtcacggatgagatagtgaaagagttcatgactccccggaagctgtccttcgactttcagtagcactcgttttacatatgcttataaaagaagtgatgtatcagtaatgtatcaataatcccagcccagtcaaagcaccgccacctgtaggcttctgtctcatggtaattactgggcctggcctctgtaagcctgtgtatgttatcaatactgtttcttcctgtgagttccattatttctatctcttatgggcaaagcattgtgggtaattggtgctggctaacattgcatggtcggatagagaagtccagctgtgagtctctccccaaagcagccccacagtggagccttcggctggaagtccatgggccaccctgttcttgtccatggaggacttccgagggttccaagtatactcttaagacccactctgtttaaaaatatatattctatgtatgcgtatatggaattgaaatgtcattattgtaacctagaaagtgctttgaaatattgatgtggggaggtttattgagcacaagatgtatttcagcccatgccccctcccaaaaagaaattgataagtaaaagcttcgttatacatttgactaagaaatcacccagctttaaagctgcttttaacaatgaagattgaacagagttcagcaattttgattaaattaagacttgggggtgaaactttccagtttactgaactccagaccatgcatgtagtccactccagaaatcatgctcgcttcccttggcacaccagtgttctcctgccaaatgaccctagaccctctgtcctgcagagtcagggtggcttttcccctgactgtgtccgatgccaaggagtcctggcctccgcagatgcttcattttgacccttggctgcagtggaagtcagcacagagcagtgccctggctgtgtcctggacgggtggacttagctagggagaaagtcgaggcagcagccctcgaggccctcacagatgtctaggcaggcctcatttcatcacgcagcatgtgcaggcctggaagagcaaagccaaatctcagggaagtccttggttgatgtatctgggtctcctctggagcactctgccctcctgtcacccagtagagtaaataaacttccttggctcctaaaaaa

SEQ ID NO: 250 - protein, 471 aa, Homo sapien
MPNSEPASLLELFNSIATQGELVRSLKAGNASKDEIDSAVKMLVSLKMSYKAAAGEDYKADCPPGNPAPTSNHGPDATEAEEDFVDPWTVQTSSAKGIDYDKLIVRFGSSKIDKELINRIERATGQRPHHFLRRGIFFSHRDMNQVLDAYENKKPFYLYTGRGPSSEAMHVGHLIPFIFTKWLQDVFNVPLVIQMTDDEKYLWKDLTLDQAYGDAVENAKDIIACGFDINKTFIFSDLDYMGMSSGFYKNVVKIQKHVTFNQVKGIFGFTDSDCIGKISFPAIQAAPSFSNSFPQIFRDRTDIQCLIPCAIDQDPYFRMTRDVAPRIGYPKPALLHSTFFPALQGAQTKMSASDPNSSIFLTDTAKQIKTKVNKHAFSGGRDTIEEHRQFGGNCDVDVSFMYLTFFLEDDDKLEQIRKDYTSGAMLTGELKKALIEVLQPLIAEHQARRKEVTDEIVKEFMTPRKLSFDFQ

SEQ ID NO: 251 - DNA, 1750 bp, Homo sapien
caccgcgcaagcgcatcctggcctttcttcagtccccacgtgcgatccttcccggcaactttttcgagaaaaatgcccaaattcaaggcggcccgtggggtggggggtcaggaaaaacatgcgcccctggccgatcagatcctggctgggaatgcggtgcgggcgggggtccgggagaagcggcggggtcgcgggacaggagaagcggaggaagagtatgtggggccccggctgagccgacggattttgcagcaagcacggcagcaacaggaggaactcgaggccgagcatgggactggggacaagcccgcggcgccgcgggaacgcaccacgcggctgggtccaagaatgcctcaggatggatcagatgacgaggacgaggagtggcccaccctggagaaggctgccacaatgacagcagcgggccatcatgcagaggtggttgtggaccctgaggatgagcgtgccatagagatgttcatgaacaagaaccctcctgccaggcgcaccctggctgacatcatcatggagaagctgactgagaagcagacagaggttgagacagtcatgtcagaggtgtcgggcttccctatgccccagctggacccccgggtcctagaagtgtacaggggggtccgggaggtattatctaagtaccgcagtggaaaactgcccaaggcatttaagatcatccctgcactctccaactgggagcaaatcctctacgtcacagagccggaggcctggactgcagctgccatgtaccaggccaccaggatttttgcctctaacctgaaggaacgcatggcccagcgcttctacaaccttgtcctgctccctcgagtacgagatgacgttgctgaatacaaacgactcaacttccatctctacatggctctcaagaaggcccttttcaaacctggagcctggttcaaagggatcctgattccactgtgcgagtctggcacttgtaccctccgggaagccatcattgtgggtagcatcatcaccaagtgctccatccctgtgttgcactccagtgcggccatgctgaaaattgctgagatggaatacagcggtgccaacagcatcttcctgcgactgctgctggataagaagtatgcactgccttaccgggtgctggatgccctagtcttccacttcctggggttccggacagagaagcgtgaactgcctgtgctgtggcaccagtgcctcctgactttggtccagcgctacaaggccgacttggccacagaccagaaagaggccctcttagaactgctccggctgcagccccatccacagctatcgcccgaaatcaggcgtgagcttcagagtgcagtcccccgcgatgtggaagatgttcccatcaccgtggagtgaggaaaacagtcagctgtcctggccaaaggggtttggaaggacaccaagacccccgttggtgactgaagatgacactgagctttaatggctgaagacccagatcagggcagtgacagatcacagggacatctgtggctcccagtccaggacaggaaggactgagggtctggctggttccctcttccattctaggcccttatccctgtttagttctgagagccaacttgagataccatatgctagcattcccagtccccagctggggcttggtgtgagtactttttctatggctattgtgtcaggtcactgtggataaaggcaaagacagatatttattgaaaaaaaaaaaaaaaaaaaaaaaaaa

SEQ ID NO: 252 - protein, 301 aa, Homo sapien
MNKNPPARRTLADIIMEKLTEKQTEVETVMSEVSGFPMPQLDPRVLEVYRGVREVLSKYRSGKLPKAFKIIPALSNWEQILYVTEPEAWTAAAMYQATRIFASNLKERMAQRFYNLVLLPRVRDDVAEYKRLNFHLYMALKKALFKPGAWFKGILIPLCESGTCTLREAIIVGSIITKCSIPVLHSSAAMLKIAEMEYSGANSIFLRLLLDKKYALPYRVLDALVFHFLGFRTEKRELPVLWHQCLLTLVQRYKADLATDQKEALLELLRLQPHPQLSPEIRRELQSAVPRDVEDVPITVE

SEQ ID NO: 253 - DNA, 973 bp, Homo sapien
tggagactcaccaatctatctccctacatcaaggtcctcttagaagtcacctttctgctgtataatacagcgtaaccctacttgagacatttccatttaaattgctctgttccacatgtttcatcctgtccttgctgtaactgtgtaggtgggtgacaacattttcgaactgtatatttgtcacctctgttagtctatctctaagaacacagccaataagacatcacttgacaagccattaccttattgaccaagactattttgtgaatcaaatgcaatgtgacttgaaaatcaaatcgtttcaatggtcatttaagttgttaattttaaaaaatggtcatttcagcttgatgcataagagcgttctttgcaggaacttcatttttgactacaaaggctttgaattttattttgctgcttgcagtaatttttgttttctttttcttccagggtatatgagaaaatattgactcctatctggccttcatcaactgacctcgaaaagcctcatgagatgctttttcttaatgtgattttgttcagcctcactgtttttaccttaatttcaactgcccacacacttgaccgtgcagtcaggagtgactggcttctccttgtcctcatttatgcatgtttggaggagctgattcctgaactcatatttaaactctactgccagggaaatgctacattatttttctaattggaagtataattagagtgatgttggtagggtagaaaaagagggagtcacttgatgctttcaggttaatcagagctatgggtgctacaggcttgtctttctaagtgacatattcttatctaattctcagatcaggttttgaaagctttgggggtctttttagattttaatccctactttctttatggtacaaatatgtacaaaagaaaaaggtcttatattcttttacacaaatttataaataaattttgaactccttctgtaaaaaaa

SEQ ID NO: 254 - protein, 39 aa, Homo sapien
MHKSVLCRNFIFDYKGFEFYFAACSNFCFLFLPGYMRKY

SEQ ID NO: 255 - DNA, 1419 bp, Homo sapien
atgagtgagaacaataagaattccttggagagcagcctacggcaactaaaatgccatttcacctggaacttgatggagggagaaaactccttggatgattttgaagacaaagtattttaccggactgagtttcagaatcgtgaattcaaagccacaatgtgcaacctactggcctatctaaagcacctcaaagggcaaaacgaggcagccctggaatgcttacgtaaagctgaagagttaatccagcaagagcatgctgaccaggcagaaatcagaagtctggtcacctggggaaactatgcctgggtctactatcacatgggccgactctcagacgttcagatttatgtagacaaggtgaaacatgtctgtgagaagttttccagtccctatagaattgagagtccagagcttgactgtgaggaagggtggacacggttaaagtgtggaggaaaccaaaatgaaagagcgaaggtgtgctttgagaaggctctggaaaagaagccaaagaacccagaattcacctctggactggcaatagcaagctaccgtctggacaactggccaccatctcagaacgccattgaccctctgaggcaagccattcggctgaatcctgacaaccagtaccttaaagtcctcctggctctgaagcttcataagatgcgtgaagaaggtgaagaggaaggtgaaggagagaagttagttgaagaagccttggagaaagccccaggtgtaacagatgttcttcgcagtgcagccaagttttatcgaagaaaagatgagccagacaaagcgattgaactgcttaaaaaggctttagaatacataccaaacaatgcctacctgcattgccaaattgggtgctgctatagggcaaaagtcttccaagtaatgaatctaagagagaatggaatgtatgggaaaagaaagttactggaactaataggacacgctgtggctcatctgaagaaagctgatgaggccaatgataatctcttccgtgtctgttccattcttgccagcctccatgctctagcagatcagtatgaagacgcagagtattacttccaaaaggaattcagtaaagagcttactcctgtagcgaaacaactgctccatctgcggtatggcaactttcagctgtaccaaatgaagtgtgaagacaaggccatccaccactttatagagggtgtaaaaataaaccagaaatcaagggagaaagaaaagatgaaagacaaactgcaaaaaattgccaaaatgcgactttctaaaaatggagcagattctgaggctttgcatgtcttggcattccttcaggagctgaatgaaaaaatgcaacaagcagatgaagactctgagaggggtttggagtctggaagcctcatcccttcagcatcaagctggaatggggaatga

SEQ ID NO: 256 - protein, 472 aa, Homo sapien
MSENNKNSLESSLRQLKCHFTWNLMEGENSLDDFEDKVFYRTEFQNREFKATMCNLLAYLKHLKGQNEAALECLRKAEELIQQEHADQAEIRSLVTWGNYAWVYYHMGRLSDVQIYVDKVKHVCEKFSSPYRIESPELDCEEGWTRLKCGGNQNERAKVCFEKALEKKPKNPEFTSGLAIASYRLDNWPPSQNAIDPLRQAIRLNPDNQYLKVLLALKLHKMREEGEEEGEGEKLVEEALEKAPGVTDVLRSAAKFYRRKDEPDKAIELLKKALEYIPNNAYLHCQIGCCYRAKVFQVMNLRENGMYGKRKLLELIGHAVAHLKKADEANDNLFRVCSILASLHALADQYEDAEYYFQKEFSKELTPVAKQLLHLRYGNFQLYQMKCEDKAIHHFIEGVKINQKSREKEKMKDKLQKIAKMRLSKNGADSEALHVLAFLQELNEKMQQADEDSERGLESGSLIPSASSWNGE

SEQ ID NO: 257 - DNA, 3176 bp, Homo sapien
tgaactgagcggcccctgagctgacagatacactgcgcagtggaacggcgagcgagccgacgggcgagtgaggggcgcacatgatcacctcggccgctggaattatttctcttctggatgaagatgaaccacagcttaaggaatttgcactacacaaattgaatgcagttgttaatgacttctgggcagaaatttccgagtccgtagacaaaatagaggttttatacgaagatgaaggtttccggagtcggcagtttgcagccttagtggcatctaaagtattttatcacctgggggcttttgaggagtctctgaattatgctcttggagcaagggacctcttcaatgtcaatgataactctgaatatgtggaaactattatagcaaaatgcattgatcactacaccaaacaatgtgtggaaaatgcagatttgcctgaaggagaaaaaaaaccaattgaccagagattggaaggcatcgtaaataaaatgttccagcgatgtctagatgatcacaagtataaacaggctattggcattgctctggagacacgaagactggacgtctttgaaaagaccatactggagtcgaatgatgtcccaggaatgttagcttatagccttaagctctgcatgtctttaatgcagaataaacagtttcggaataaagtactaagagttctagttaaaatctacatgaacttggagaaacctgatttcatcaatgtttgtcagtgcttaattttcttagatgatcctcaggctgtgagtgatatcttagagaaactggtaaaggaagacaacctcctgatggcatatcagatttgttttgatttgtatgaaagtgctagccagcagtttttgtcatctgtaatccagaatcttcgaactgttggcacccctattgcttctgtgcctggatccactaatacgggtactgttccgggatcagagaaagacagtgactcgatggaaacagaagaaaagacaagcagtgcatttgtaggaaagacaccagaagccagtccagagcctaaggaccagactttgaaaatgattaaaattttaagtggtgaaatggctattgagttacatctgcagttcttaatacgaaacaataatacagacctcatgattctaaaaaacacaaaggatgcagtacggaattctgtatgtcatactgcaaccgttatagcaaactcttttatgcactgtgggacaaccagtgaccagtttcttagagataatttggaatggttagccagagccactaactgggcaaaatttactgctacagccagtttgggtgtaattcataagggtcatgaaaaagaagcattacagttaatggcaacataccttcccaaggatacttctccaggatcagcctatcaggaaggtggaggtctctatgcactaggtcttattcatgccaatcatggtggtgatataattgactatctgcttaatcagcttaagaacgccagcaatgatatcgttagacacggtggcagtctgggccttggtttggcagccatgggaactgcacgtcaagatgtttatgatttgctaaaaacaaacctttatcaggatgatgcagtaacaggggaagcagctggcctggccctaggtttggttatgttgggctctaaaaatgctcaggctattgaggacatggttggttatgcacaagaaactcaacatgagaagattctgcgtggtcttgcagttggcatagctttagtaatgtatgggaggatggaagaggctgatgctctcattgaatctctctgtcgtgacaaggacccaattcttcgaaggtctggaatgtatactgtagccatggcttattgtggctctggtaacaacaaagcaattcgacgcctgctacatgtggctgtaagtgatgtgaatgatgatgtcaggagtgcagcagtagaatcacttgggttcattctattcagaacccctgaacagtgcccaagtgttgtctctttgttgtcagagagttacaaccctcatgtgcgctacggagctgcaatggccttggggatatgctgtgctggtacaggaaacaaggaagccattaatttgctagaaccaatgacaaacgaccccgtgaactacgtgaggcaaggggcactcatagcttcagctctcatcatgatccagcagactgaaatcacttgtccaaaggtgaatcagttcagacagctgtattccaaagtcatcaatgataagcatgatgatgtcatggccaagtttggcgctattctggcccagggcatactggatgcaggtggtcataatgtcacaatctccttgcagtccaggactgggcatactcatatgccttctgtggttggcgtccttgtatttacccagttttggttctggtttcctctttcacacttcctgtcattggcttatacccctacctgtgtcattggccttaacaaggacttaaagatgccgaaagttcagtataaatcgaactgtaaaccatccacatttgcatatcctgcccctctggaagtaccaaaagaaaaagaaaaggaaaaggtttctactgctgtattatctataactgccaaggctaaaaagaaggaaaaagaaaaggaaaaaaaggaggaggagaaaatggaagtggatgaggcagagaaaaaggaggaaaaagagaagaaaaaagaacctgagccaaacttccagttattggataacccagcccgagttatgcctgcccagcttaaggtcctaaccatgccggagacctgtagataccagcctttcaaaccactctctattggaggcatcatcattctgaaggataccagtgaagacattgaggagctggtggaacctgtggcagcacatggcccaaaaatcgaggaggaggaacaagagccagaacccccagaaccatttgagtatattgatgattaaggaccagaggatctcacttgcttatctgaagaagattgtccaggctcatattgggaatgcttatgaggaaattcatgccgagacctgctattcaatgcatgtatcgttgcctctgcactgacctgaagaaccctgtctccaagtctttggttgaagagaagatatatgactgttgagtgtgctctttcacagaacttggttttcaaataaatataagatctccagatggacaag

SEQ ID NO: 258 - protein, 953 aa, Homo sapien [sequence omitted]

SEQ ID NO: 259 - DNA, 960 bp, Homo sapien
cgcaaagagtagtcagtcccttcttggctctgctgacactcgagcccacattccatcacctgctcccaatcatgcaggtctccactgctgcccttgccgtcctcctctgcaccatggctctctgcaaccaggtcctctctgcaccacgtgagtccatgttgttgttgtgggtatcaccactctctggccatggttagaccacatcagtctttttttgcggcctgagagccccgaagagaaaagaaggaagttcttaaagcgctgccaaacaccttggtctttttcttcacaacttttatttttatctctagaaggggtcttagccctcctagtctccagttgctgctgacacgccgaccgcctgctgcttcagctacacctcccgacagattccacagaatttcatagctgactactttgagacgagcagccagtgctccaagcccagtgtcatcttcctaaccaagagaggccggcaggtctgtgctgaccccagtgaggagtgggtccagaaatacgtcagtgacctggagctgagtgcctgaggggtccagaagcttcgaggcccagcgacctcagtgggcccagtggggaggagcaggagcctgagccttgggaacatgcgtgtgacctctacagctacctcttctatggactggttattgccaaacagccacactgtgggactcttcttaacttaaattttaatttatttatactatttagtttttataatttatttttgatttcacagtgtgtttgtgattgtttgctctgagagttccccctgtcccctccaccttccctcacagtgtgtctggtgacaaccgagtggctgtcatcggcctgtgtaggcagtgatggcaccaaagccaccagactgacaaatgtgtgatcagatgcttttgttcagggctgtgatcggcctggggaaataataaagatgttcttttaaacggt

SEQ ID NO: 260 - protein, 93 aa, Homo sapien
MQVSTAALAVLLCTMALCNQVLSAPLAADTPTACCFSYTSRQIPQNFIADYFETSSQCSKPSVIFLTKRGRQVCADPSEEWVQKYVSDLELSA

SEQ ID NO: 261 - DNA, 3521 bp, Homo sapien
gagagagaaggagaagataatatactgaaaagaagaggaggaggagagcgacgggacgggacgcgagcgggagcgcagccgccctctcggctccgcggcggcgcctcgcaagtccgggaggcgaggggggcccgaggggagacgccgtgacaactttcgtttccctctgagggaattgggaggtcggcggccccaaaagctttcagtccagtgtaaagctgttggagcgcgggagcaaaggtaaagaatgatgtaatgcactggctgctccaaagcatcttttgttgtggaatggttattccagtcatctctttatgaatcaaatgtgaggggctgctttgtggacggagtcctttgcaagagcacatcaacgggaaagagaaagagacattcacttggagggctcttgctgaaaatgggtttaactctccttttgccagtcaccaccagcctgacctcatacacttttagtacaatggagtggctgagcctttgagcacaccaccattacatcatcgtggcaaattaaagaaggaggtgggaaaagaggacttattgttgtcatggcccatgagatgattggaactcaaattgttactgagaggttggtggctctgctggaaagtggaacggaaaaagtgctgctaattgatagccggccatttgtggaatacaatacatcccacattttggaagccattaatatcaactgctccaagcttatgaagcgaaggttgcaacaggacaaagtgttaattacagagctcatccagcattcagcgaaacataaggttgacattgattgcagtcagaaggttgtagtttacgatcaaagctcccaagatgttgcctctctctcttcagactgttttctcactgtacttctgggtaaactggagaagagcttcaactctgttcacctgcttgcaggtgggtttgctgagttctctcgttgtttccctggcctctgtgaaggaaaatccactctagtccctacctgcatttctcagccttgcttacctgttgccaacattgggccaacccgaattcttcccaatctttatcttggctgccagcgagatgtcctcaacaaggagctgatgcagcagaatgggattggttatgtgttaaatgccagcaatacctgtccaaagcctgactttatccccgagtctcatttcctgcgtgtgcctgtgaatgacagcttttgtgagaaaattttgccgtggttggacaaatcagtagatttcattgagaaagcaaaagcctccaatggatgtgttctagtgcactgtttagctgggatctcccgctccgccaccatcgctatcgcctacatcatgaagaggatggacatgtctttagatgaagcttacagatttgtgaaagaaaaaagacctactatatctccaaacttcaattttctgggccaactcctggactatgagaagaagattaagaaccagactggagcatcagggccaaagagcaaactcaagctgctgcacctggagaagccaaatgaacctgtccctgctgtctcagagggtggacagaaaagcgagacgcccctcagtccaccctgtgccgactctgctacctcagaggcagcaggacaaaggcccgtgcatcccgccagcgtgcccagcgtgcccagcgtgcagccgtcgctgttagaggacagcccgctggtacaggcgctcagtgggctgcacctgtccgcagacaggctggaagacagcaataagctcaagcgttccttctctctggatatcaaatcagtttcatattcagccagcatggcagcatccttacatggcttctcctcatcagaagatgctttggaatactacaaaccttccactactctggatgggaccaacaagctatgccagttctcccctgttcaggaactatcggagcagactcccgaaaccagtcctgataaggaggaagccagcatccccaagaagctgcagaccgccaggccttcagacagccagagcaagcgattgcattcggtcagaaccagcagcagtggcaccgcccagaggtcccttttatctccactgcatcgaagtgggagcgtggaggacaattaccacaccagcttccttttcggcctttccaccagccagcagcacctcacgaagtctgctggcctgggccttaagggctggcactcggatatcttggccccccagacctctaccccttccctgaccagcagctggtattttgccacagagtcctcacacttctactctgcctcagccatctacggaggcagtgccagttactctgcctacagctgcagccagctgcccacttgcggagaccaagtctattctgtgcgcaggcggcagaagccaagtgacagagctgactcgcggcggagctggcatgaagagagcccctttgaaaagcagtttaaacgcagaagctgccaaatggaatttggagagagcatcatgtcagagaacaggtcacgggaagagctggggaaagtgggcagtcagtctagcttttcgggcagcatggaaatcattgaggtctcctgagaagaaagacacttgtgacttctatagacaatttttttttcttgttcacaaaaaaattccctgtaaatctgaaatatatatatgtacatacatatatatttttggaaaatggagctatggtgtaaaagcaacaggtggatcaacccagttggttactctcttaacatctgcatttgagagatcagctaatacttctctcaacaaaaatggaagggcagatgctagaatcccccctagacggaggaaaaccattttattcagtgaattacacatcctcttgttcttaaaaaagcaagtgtctttggtgttggaggacaaaatcccctaccattttcacgttgtgctactaagagatctcaaatattagtctttgtccggacccttccatagtacaccttagcgctgagactgagccagcttgggggtcaggtaggtagaccctgttagggacagagcctagtggtaaatccaagagaaatgatcctatccaaagctgattcacaaacccacgctcacctgacagccgagggacacgagcatcactctgctggacggaccattaggggccttgccaaggtctaccttagagcaaacccagtacctcagacaggaaagtcggggctttgaccactaccatatctggtagcccattttctaggcattgtgaataggtaggtagctagtcacacttttcagaccaattcaaactgtctatgcacaaaattcccgtgggcctagatggagataatttttttttcttctcagctttatgaagagaagggaaactgtctaggattcagctgaaccaccaggaacctggcaacatcacgatttaagctaaggttgggaggctaacgagtctacctccctctttgtaaatcaaagaattgtttaaaatgggattgtcaatcctttaaataaagatgaacttggtttcaaaaaaaaaaaaaaaaaaaaaaa

SEQ ID NO: 262 - protein, 665 aa, Homo sapien
MAHEMIGTQIVTERLVALLESGTEKVLLIDSRPFVEYNTSHILEAININCSKLMKRRLQQDKVLITELIQHSAKHKVDIDCSQKVVVYDQSSQDVASLSSDCFLTVLLGKLEKSFNSVHLLAGGFAEFSRCFPGLCEGKSTLVPTCISQPCLPVANIGPTRILPNLYLGCQRDVLNKELMQQNGIGYVLNASNTCPKPDFIPESHFLRVPVNDSFCEKILPWLDKSVDFIEKAKASNGCVLVHCLAGISRSATIAIAYIMKRMDMSLDEAYRFVKEKRPTISPNFNFLGQLLDYEKKIKNQTGASGPKSKLKLLHLEKPNEPVPAVSEGGQKSETPLSPPCADSATSEAAGQRPVHPASVPSVPSVQPSLLEDSPLVQALSGLHLSADRLEDSNKLKRSFSLDIKSVSYSASMAASLHGFSSSEDALEYYKPSTTLDGTNKLCQFSPVQELSEQTPETSPDKEEASIPKKLQTARPSDSQSKRLHSVRTSSSGTAQRSLLSPLHRSGSVEDNYHTSFLFGLSTSQQHLTKSAGLGLKGWHSDILAPQTSTPSLTSSWYFATESSHFYSASAIYGGSASYSAYSCSQLPTCGDQVYSVRRRQKPSDRADSRRSWHEESPFEKQFKRRSCQMEFGESIMSENRSREELGKVGSQSSFSGSMEIIEVS

SEQ ID NO: 263 - DNA, 597 bp, Homo sapien
agctgaagttgaggatctcttactctctaagccacggaattaacccgagcaggcatggaggcctctgctctcacctcatcagcagtgaccagtgtggccaaagtggtcagggtggcctctggctctgccgtagttttgcccctggccaggattgctacagttgtgattggaggagttgtggccatggcggctgtgcccatggtgctcagtgccatgggcttcactgcggcgggaatcgcctcgtcctccatagcagccaagatgatgtccgcggcggccattgccaatgggggtggagttgcctcgggcagccttgtgggtactctgcagtcactgggagcaactggactctccggattgaccaagttcatcctgggctccattgggtctgccattgcggctgtcattgcgaggttctactagctccctgcccctcgccctgcagagaagagaaccatgccaggggagaaggcacccagccatcctgacccagcgaggagccaactatcccaaatatacctgggtgaaatataccaaattctgcatctccagaggaaaataagaaataaagatgaattgttgcaactcttaaaaaaa

SEQ ID NO: 264 - protein, 122 aa, Homo sapien
MEASALTSSAVTSVAKVVRVASGSAVVLPLARIATVVIGGVVAMAAVPMVLSAMGFTAAGIASSSIAAKMMSAAAIANGGGVASGSLVGTLQSLGATGLSGLTKFILGSIGSAIAAVIARFY

SEQ ID NO: 265 - DNA, 1718 bp, Homo sapien
atggggcttggggctgggcggccagacgctaactcggatgctcccaggctacgccttggccatgacccgtgcggccgcgcgcccccgccttcaccttcggcgcgcgcttccccacgcagcagacgacgtgcggccccgggccaggccacctggtgcccgctcgcatgaccgtgcgcggcaccgacggcgcccccgcctactccatctacggccgcccacgccgctcagcgcccttcctcactccgggacctggtcaggacccccgggcccctggccaccccaacgccgaactgcgtccagggaggcccacctgggaacccccgacctgaaccccgagtccccctcggataccctaacacgatattcggtacccccatatccggatctcaaatcccaaaccccgaacccacggggctttgataaatcgtggctcagactccccactagtcccaggaccccatctcgggtacccaccaggctcccacgcagttctagccccccacacccttgatccgccccgcaggcaggtacttcccggagcgagcggggaacgcgacgtaccccagtgcgcctcggcacaccattgctccccgaaactggggtgtccaggcggaacagcagagcccaggtcccgcggcctatacggtgccctcgctcttgggtccgcgcgtcatcggcaaagtctccgccccaacttgctccatctacggccgcagagcggctggcagtttcttcgaggacctcagcaaggtcgtgagtccaggggtctacaagtcccgggccccccagttcacgattctggcgcggacttcgctcccccaagacaacactcggaagccagggcccgcggcctacaacgtggatcagcaccggaagccccgcggctggagtttcgggatccggcactcggactacctggccccgctggtgaccgacgcggacaactgacccgccaggcgggagcggccccacacgtgtttgcttaaagtctgcgagtccgcatcgtgtccgcctctctctctctctctctgcgcgtcctggcgcaaggcctggggtggagccacggctggggccgtgtcccaactccgaacccagcggggcggggcccgagcgtcgggcgaggccgggaccccagcgctgcgccgcgtccgaacgtcgagaccccaccgagggcgggagggggactctcgggagccacagacgcccgagacccacgccgggcgggaccggccagggatcacccccgccgacggccccgggccccgacggcccggaagttccgcgtgtccgggggcaccgggggattggccggggcgcggcgtgcaaggcttcccgggggcggcgactgccgagctccgccctccaggcggccccacccgcctgccgtcctggggcgccgccgccccgccgccggcagtggaccgctgtgcgcgaaccctgaaccctacggtcccgacccgcgggcgaggccgggtacctgggctgggatccggagcaagcgggcgagggcagcgccctaagcaggtacgggcggggctcaagtcgcgaggcggggaagcgggaggcagacacggacgagggcgacacagacacgggaccgaggggcggacaccggagagacacgggaaaggggtcgggacaggagcacgtggctcagacaccgacgccgggaggccgcagaccccggacgtgtcaggcatccccgcaggcccggagcg

SEQ ID NO: 266 - protein, 55 aa, Homo sapien [sequence omitted]

SEQ ID NO: 267 - DNA, 2952 bp, Homo sapien
agactgaccactagccgacgcgggcgagagggacaggagcgtgacctccccatcccgaggggccggacgctcgggcgcctccccgctccccccactcggaggccgcgcgcgccgttagccccttcctcgctcccccgccccagtcccgcagtccgggaggcgggggtcggcagccggctgagtgggaaccgcgcggtgtctgaggaggcagtcggcgaccggtttccacttcaagcgtgacccttttgcctgtgggatgagctccagcatggggtgaggtacagaagagagacttgaagagcgtgccttgggactcaagcgccaaacctgtaccctagcgagtgtcctactccgcatccgtaatggaaggaaatgcacatcttactccagaggcacaagaggaggacatcccatgcggctactcctgcccagcgtggtggggcagcagaagctccagagcccagacttgcaggctcacggtgcagggtgaacctggccacagctcaccctggaacagccacaatgtctgccccttagagaagaaccctgaaatcagaccagtttttgcggcctccccctttcctctctgttacagtgccctttccaggccttaagagaagtaaaacttagctgcagcgccaggaggtggaccccagagtgtgagtggcacgcttccctgtgaacccgtcctcaccatgtttgccacatctggggcagtggcagcggggaagccttactcgtgcagcgaatgtggcaagagcttctgctacagctcagtgctgctgcgacatgaacgagctcacggcggtgacggccgcttccgttgcctagaatgcggtgagcgctgtgcacgggctgctgacctccgagcgcacaggcgcacgcatgctggccagaccctctacatctgcagtgagtgcggacaaagcttccgccacagcggccgtcttgacctacacttgggcgcacaccggcagcgatgccgcacttgcccctgccgcacatgcggccggcgcttcccgcacctcccggcgctgctgctacaccggcgccgccagcatctgccagagcggccccgccgctgcccgctgtgcgcccgcaccttccggcagagcgcgctgctcttccaccaggcgcgggcgcaccccttggggacaacctctgaccctgctgccccaccccaccgctgcgcgcagtgcccgcgagccttccgaagcggcgccgggctgcggagtcacgcgcgcatccacgtgtcccggagccccacgcgaccccgtgtctcagacgcccaccagtgtggcgtgtgcggcaagtgctttggcaagagctctacgctgacgcgacacctgcagacgcactcgggggagaaacccttcaagtgcccggagtgcggcaagggcttcctggagagtgccacgctggtgcgccaccagcgcacacacacgggcgagaagccgtacgcatgtggcgactgtggacgctgcttcagcgagagttccacgctgctgcgccatcggcgcagccatcagggcgagcggccacatgcgtgcgccacttgcggcaagggtttcgggcagcgctccgacctggtggtgcaccagcgcatccacacgggcgagaagcccttcgcgtgccccgagtgcggccgccgcttcagcgaccgctcggacctcaccaagcaccggcgcacgcacacgggcgagaagccctaccgctgcgaactgtgcggcaagcggttcacgtgcgtgtccaatctcaacgtgcatcggcgcaaccatgccggccacaagccacacaaatgccccgagtgcagcaaggccttcagcgtcgcctccaagcttgcactgcaccgcaagacgcacctgggcgaacggccagcggagtgcgcagagtgcggcaagtgcttcagccacagccgctcgctgtcacagcatcagcgggcccacacgcgcgcccgcaccgctgccgccgttgccatccagtccgcagtgggcactgccctcgtctttgaggggccggctgaacaggaaaagccagggttctctgtgtcctagttgagggaggcttgctgaggcttctctaaaggtggttgggcaagcacctatatagtatcacggggacagttgaggcaactcgtagatggagatttgggaaaagacgatgtggcctcctacctttccagtttctgttggcagcccttcacgtagcctcctgcctcgcctctacacctactaccctgtcggcccttttgccatgctgtcctcgtataactcggattctctcctcaggtgtaggtgcagggagtcagggaacccttagactcccctgtgtgcaagagcccaggtgttggtgtgtccctttaatgctactgtgctctctggtgtttctgattttcctgcctttattctgtcttctcttgtcctatctcattccagcccacatcttctcctttcctgattacttttgttgtcctgcctcttcaggtaatggtcacagatttggctgtaggcacgttaccagccctgtggcttcttgactcttggttccctgttaactctgtttctgagaaatgtgggtatggaggtgggtgggaaagctcacttccatgaaggatgtctccatgctaggagctgcctgcaccctggcagaggtggccagtcacgtgaaggtgggcagggcccttagcatggccacacatgtccccagggcagatcaaggggcctctcagaaccatgttccccagccaggtgaggaccattttcactgggacccaggccaaaaccatgtgggtgcacaaagccaggcactgccaagtggaacatgaggttatttccaaatcatgggagccaccagcagggagagggcaggatggaaaatcccctggagccggtcaactttttgctcatggctagtgaaataaagttgtttgagtactaaaaaaaaaaaaaaaaa

SEQ ID NO: 268 - protein, 452 aa, Homo sapien
MFATSGAVAAGKPYSCSECGKSFCYSSVLLRHERAHGGDGRFRCLECGERCARAADLRAHRRTHAGQTLYICSECGQSFRHSGRLDLHLGAHRQRCRTCPCRTCGRRFPHLPALLLHRRRQHLPERPRRCPLCARTFRQSALLFHQARAHPLGTTSDPAAPPHRCAQCPRAFRSGAGLRSHARIHVSRSPTRPRVSDAHQCGVCGKCFGKSSTLTRHLQTHSGEKPFKCPECGKGFLESATLVRHQRTHTGEKPYACGDCGRCFSESSTLLRHRRSHQGERPHACATCGKGFGQRSDLVVHQRIHTGEKPFACPECGRRFSDRSDLTKHRRTHTGEKPYRCELCGKRFTCVSNLNVHRRNHAGHKPHKCPECSKAFSVASKLALHRKTHLGERPAECAECGKCFSHSRSLSQHQRAHTRARTAAAVAIQSAVGTALVFEGPAEQEKPGFSVS

SEQ ID NO: 269 - DNA, 570 bp, Homo sapien
ggccgtgccttctctcgcttcggactgcgcaacgctgcgctctgggctgacaggcggataaaacggtcccatcaagactgagaaaaagcacaccagctattggcacagcgtgggcagtggggcctacaggatgactgacttagtctacagagatcccggcgtacttaagcagatgaagactcttaagatgacagaaggtgatttttctggtgatcgaggacttccggggtaatgacagtgatgaaatgcaggggacctggttgcccccaagtttcctggcagtgtgtgatactgaggaggtgagcttgtttctggagctgtgctttaagattcatgttacatgtaaagctgtcctcatttgtgactatggacctatggagttgggacaatctctatgggaagcagaaggcaaggaccccggtcattttaggtagaaacaacagcatgctaatgcaaaaaattatgcagtgtgctactgaacttcagaggtgatcaataaaagaagaataaaaagactaataaaaaaaaaaaaaaaaaaaaaaaaaaaaaaaaaaaaaaaaaaaaaaaaaa

SEQ ID NO: 270 - protein, 62 aa, Homo sapien
MQGTWLPPSFLAVCDTEEVSLFLELCFKIHVTCKAVLICDYGPMELGQSLWEAEGKDPGHFR

SEQ ID NO: 271 - DNA, 3462 bp, Homo sapien
gaggaacatgattttattggttctttcagttcaccacatccgactcgcgtctcggccctggcccgccttgcggaccttaaagcagtcagtccagggtttgggggaaacgtgctcacccgacggcagctcacaggaccccggagagtcctggcatggtatctcggtccggactctccgctgggcccacgaaggagaaaggctgcctcggattcctgcgcccaagccaaggtccggcgcccacggaggcaagtccggtctcacggtgacctcccgctggcgccgccttcgccgccaaccatccagttcttcctccaggccacgttctcctgcgtggtcgctgcctcctgcagagtggccagcaatagctgctgggtcctggccgcctcctccctgctccttgggtcctgcagtggcatctcctgagggcaggaaggggagttcgcaggagctccagtccggggctctccacccgcccacccttcctcgggactaccagttgcttctacctttagcatttcctgcttccgccgctctcccggggtcacgataacgaggagcgcgtagcccacgccagcccctgcgcccagcattgcgactgagatcagcattttccgcaaggaatccatggccgcctgcacagccagcggagcgcccacgggagctccccgcagccgcaagctgttgccgcgcggtctcactaccccttggcgcaggctagagcgccctatagcagaaaccatagataagcggccggctagagaggacctgctcgaggaaacgtttggaatccggagcgcttggatctcaggtttagctgagggggttgaggtgtccaagaagtgctggcaccaagggctgagcgcggggaccctgtgtcctcaattccggggtgggattgctagggggagagtgcgtgtcttcatggttgccgtgggttttatgattgcccatttttctgtcttccgacgtttcccgatcagtagaggcccgagctgtgctctgtggtttcctgcagtcacccgcgagttttcaacacagcgcatggagggcatctacacacatacacatccctctccatcccctcaactctggaacaaacactcaaagtcaagtatactggttggagaaatgggtaatagttacttatctttaacatttattttacaaacaacctattccttttctcgtcatggtacacacttggtattgtttgggtttttttttggttttgttgttgttgttagtgtgtgggcgtggttttgtttgtttttggagacaaggtctcgctctgtcgcccagggctggagtgcagtggcgcgatcatggctcactgaagcctcgacttccagggcccaagcgatcctcctgcctcaacctcccggatagctgggattacaggcgtgcaccaccacgcccggctggtattgctttttgttttgcttcgttttcttttttgctttttgagacagagtctcactctgttgcccagctggagtgcagtggcgtgatctcggctcactgcaagctctgcctcccgggttcacgccattctcctgcctcagcctcccgagtagctgggactacaggcgcccgccaccacggccggctaattttttgtatttttagtagagaaagagtttcactatgtaggtcaggctggtctcgaactcctgacctcgtgatccgcccaatccgcccacctcggcctcccaaagtgctgggattacaggtgtgagccaccgcgcccggctgttttgctttgttttcaaccactaaaaggctggattcgtgtaacatactgaattctgctttacagaagaaaacacctcttagctgtgtgactgattataggcaagttcttgtgccccggtttctgcatcagaaaatgaagcttataacaacagtacttgtctcacagttttaggataattaaattagttatatgtaaagcaattaaaacagctcctgccaaagagtaaacaccatataaatattcattaaataacatacaaacataccaggttgggaaaaatcagtaagcataggagtcaggaaattccaagttggttatcacaactcttggcccacagggctttaatccaggtgcccttgtctcctacccttgttgccatcccagtgtctccagggagtaagtagaaataaagatcctatctcacctcttgggcattttcccctgccctgaaagcgtataatcgcttagcacagtcggtgcttaaggggccaggctccaaagaagattaaaggaacagtttgtggggtgcactgggcagcagtactctcctctgagttcaatcatcttgcactctaagaatcaccaccatggcccttgtgccagggagaagcaaggaggatgggctttggactagaaatagcccaggctcctcccagcatccagaaagtcccaggctgcccaaccctctctgggacagaggaaaaattggcaaggttgaaggtcaccagcacattcaggatttctctcaaaagtcccatctgccgtctattgtggtggaatccagtgaggtgaatgaagagagtggggatctccatttgccccatgaggagctgctgctgctcactgatggtgaggaagaggatgctgaggccttcttccaagaccaaagtgaagagccaggctgggcttggagcccacaggaccctagaagtcctttaagaacatttaacgctggactcagctgggggcaggaccaggatgaagaagatgcttgttggattcttgaggacacagcatgtctggaagccaccaaccactgtcccttctgggactcaacaggctcccgtgtttgtagaagtggctttgtggaatattcccatctcctgcctcctaatagctttgagggagctgaagaagaagctgttcaaacgccggcgggtgttgaatcgggagcggcgtctgaggcaccgggtggtcggggctgtgatagaccaagggctgatcacgcggcaccacctcaagaagcgggcgtccagtgcacgtgccaacattacactgtcagggaagaagcgcagaaaactcctccagcagatccggcttgcccagaaagagaagacagccatggaagtggaagccccttcaaagccagccaggactagtgaaccacagctcaaaaggcaaaagaagacaaaagccccccaggatgtagaaatgaaggaccttgaagatgagagctaaacctcttccactagaagattctcaactggagccagccttcagactcagtggttgtttcagaggactttgacaaaagcaaggccccttttcactctccagatttcctcctacctaatggcctactgacctcccctagagggatgtctttgggagggaagaaggtacagaagaaagattggagaagggcctctctagcagtcaactccatttgtaataaagccctagcactctgaaaaaaaaaaaaaaaaaaa

SEQ ID NO: 272 - protein, 159 aa, Homo sapien
MKKMLVGFLRTQHVWKPPTTVPSGTQQAPVFVEVALWNIPISCLLIALRELKKKLFKRRRVLNRERRLRHRVVGAVIDQGLITRHHLKKRASSARANITLSGKKRRKLLQQIRLAQKEKTAMEVEAPSKPARTSEPQLKRQKKTKAPQDVEMKDLEDES

SEQ ID NO: 273 - DNA, 672 bp, Homo sapien
ctcactgaatctgccttagtgagaatgtcactaccttattgcttatattaatgcagatgtctttctctgccctccttgtttccagattgtaccatcataatcaacccttcatagggcttcctatcagagcagaggttctaatgactctctattccctgcaggatgaagtgcaaactctttagtatggcctgtgttttccatgactcgcccctgcctacatccatggcttcatctactacctttcccctcacaatggtctctccttagtagatagtgaaatattagtgtactattctttttacatgaaaatgacatagtgaaagagaaggactagtttagcctgtctttgcagaaagaatgaagaataaataatgacatacttgaaagtaacagacatggatttgaaccctagatttgccatgaaatgtctgaatgcctttggtcaatttacataatggcagaaagccttacaaattcctagtgaagattaaactcaataacgcgggcaaagtgcttaacaaaattgctggaacatagtacacctctacatgctcaataaatgggagttaattaccttttttacctccccttcccttcccaaatagtatgcattaccttttaaattttaaattgagaagtttacagttgaattaaaaaatgcaatgaatcaca

SEQ ID NO: 274 - protein, 16 aa, Homo sapien
LTESALVRMSLPYCLY

SEQ ID NO: 275 - DNA, 2195 bp, Homo sapien
aggggagagcggccgccgccgctgccgcttccaccacagtttgaagaaaacaggtctgaaacaaggtcttacccccagctgcttctgaacacagtgactgccagatctccaaacatcaagtccagctttgtccgccaacctgtctgacatgtcgggacccgtgccaagcagggccagagtttacacagatgttaatacacacagacctcgagaatactgggattacgagtcacatgtggtggaatggggaaatcaagatgactaccagctggttcgaaaattaggccgaggtaaatacagtgaagtatttgaagccatcaacatcacaaataatgaaaaagttgttgttaaaattctcaagccagtaaaaaagaagaaaattaagcgtgaaataaagattttggagaatttgagaggaggtcccaacatcatcacactggcagacattgtaaaagaccctgtgtcacgaacccccgccttggtttttgaacacgtaaacaacacagacttcaagcaattgtaccagacgttaacagactatgatattcgattttacatgtatgagattctgaaggccctggattattgtcacagcatgggaattatgcacagagatgtcaagccccataatgtcatgattgatcatgagcacagaaagctacgactaatagactggggtttggctgagttttatcatcctggccaagaatataatgtccgagttgcttcccgatacttcaaaggtcctgagctacttgtagactatcagatgtacgattatagtttggatatgtggagtttgggttgtatgctggcaagtatgatctttcggaaggagccatttttccatggacatgacaattatgatcagttggtgaggatagccaaggttctggggacagaagatttatatgactatattgacaaatacaacattgaattagatccacgtttcaatgatatcttgggcagacactctcgaaagcgatgggaacgctttgtccacagtgaaaatcagcaccttgtcagccctgaggccttggatttcctggacaaactgctgcgatatgaccaccagtcacggcttactgcaagagaggcaatggagcacccctatttctacactgttgtgaaggaccaggctcgaatgggttcatctagcatgccagggggcagtacgcccgtcagcagcgccaatatgatgtcagggatttcttcagtgccaaccccttcaccccttggacctctggcaggctcaccagtgattgctgctgccaacccccttgggatgcctgttccagctgccgctggcgctcagcagtaacggccctatctgtctcctgatgcctgagcagaggtgggggagtccaccctctccttgatgcagcttgcgcctggcggggaggggtgaaacacttcagaagcaccgtgtctgaaccgttgcttgtggatttatagtagttcagtcataaaaaaaaaattataataggctgattttcttttttctttttttttttaactcgaacttttcataactcaggggattccctgaaaaattacctgcaggtggaatatttcatggacaaatttttttttctcccctcccaaatttagttcctcatcacaaaagaacaaagataaaccagcctcaatcccggctgctgcatttaggtggagacttcttcccattcccaccattgttcctccaccgtcccacactttagggggttggtatctcgtgctcttctccagagattacaaaaatgtagcttctcaggggaggcaggaagaaaggaaggaaggaaagaaggaagggaggacccaatctataggagcagtggactgcttgctggtcgcttacatcactttactccataagcgcttcagtggggttatcctagtggctcttgtggaagtgtgtcttagttacatcaagatgttgaaaatctacccaaaatgcagacagatactaaaaacttctgttcagtaagaatcatgtcttactgatctaaccctaaatccaactcatttatacttttatttttagttcagtttaaaatgttgataccttccctcccaggctccttaccttggtcttttccctgttcatctcccaacatgctgtgctccatagctggtaggagagggaaggcaaaatctttcttagttttctttgtcttggccattttgaattc

SEQ ID NO: 276 - protein, 391 aa, Homo sapien
MSGPVPSRARVYTDVNTHRPREYWDYESHVVEWGNQDDYQLVRKLGRGKYSEVFEAINITNNEKVVVKILKPVKKKKIKREIKILENLRGGPNIITLADIVKDPVSRTPALVFEHVNNTDFKQLYQTLTDYDIRFYMYEILKALDYCHSMGIMHRDVKPHNVMIDHEHRKLRLIDWGLAEFYHPGQEYNVRVASRYFKGPELLVDYQMYDYSLDMWSLGCMLASMIFRKEPFFHGHDNYDQLVRIAKVLGTEDLYDYIDKYNIELDPRFNDILGRHSRKRWERFVHSENQHLVSPEALDFLDKLLRYDHQSRLTAREAMEHPYFYTVVKDQARMGSSSMPGGSTPVSSANMMSGISSVPTPSPLGPLAGSPVIAAANPLGMPVPAAAGAQQ

SEQ ID NO: 277 - DNA, 1350 bp, Homo sapien
aggttaatcttaaaagcccaggttacccgcggaaatttatgctgtccggtcaccgtgacaatgcagctgaggaacccagaactacatctgggctgcgcgcttgcgcttcgcttcctggccctcgtttcctgggacatccctggggctagagcactggacaatggattggcaaggacgcctaccatgggctggctgcactgggagcgcttcatgtgcaaccttgactgccaggaagagccagattcctgcatcagtgagaagctcttcatggagatggcagagctcatggtctcagaaggctggaaggatgcaggttatgagtacctctgcattgatgactgttggatggctccccaaagagattcagaaggcagacttcaggcagaccctcagcgctttcctcatgggattcgccagctagctaattatgttcacagcaaaggactgaagctagggatttatgcagatgttggaaataaaacctgcgcaggcttccctgggagttttggatactacgacattgatgcccagacctttgctgactggggagtagatctgctaaaatttgatggttgttactgtgacagtttggaaaatttggcagatggttataagcacatgtccttggccctgaataggactggcagaagcattgtgtactcctgtgagtggcctctttatatgtggccctttcaaaagcccaattatacagaaatccgacagtactgcaatcactggcgaaattttgctgacattgatgattcctggaaaagtataaagagtatcttggactggacatcttttaaccaggagagaattgttgatgttgctggaccagggggttggaatgacccagatatgttagtgattggcaactttggcctcagctggaatcagcaagtaactcagatggccctctgggctatcatggctgctcctttattcatgtctaatgacctccgacacatcagccctcaagccaaagctctccttcaggataaggacgtaattgccatcaatcaggaccccttgggcaagcaagggtaccagcttagacagggagacaactttgaagtgtgggaacgacctctctcaggcttagcctgggctgtagctatgataaaccggcaggagattggtggacctcgctcttataccatcgcagttgcttccctgggtaaaggagtggcctgtaatcctgcctgcttcatcacacagctcctccctgtgaaaaggaagctagggttctatgaatggacttcaaggttaagaagtcacataaatcccacaggcactgttttgcttcagctagaaaatacaatgcagatgtcattaaaagacttactttaa

SEQ ID NO: 278 - protein, 429 aa, Homo sapien
MQLRNPELHLGCALALRFLALVSWDIPGARALDNGLARTPTMGWLHWERFMCNLDCQEEPDSCISEKLFMEMAELMVSEGWKDAGYEYLCIDDCWMAPQRDSEGRLQADPQRFPHGIRQLANYVHSKGLKLGIYADVGNKTCAGFPGSFGYYDIDAQTFADWGVDLLKFDGCYCDSLENLADGYKHMSLALNRTGRSIVYSCEWPLYMWPFQKPNYTEIRQYCNHWRNFADIDDSWKSIKSILDWTSFNQERIVDVAGPGGWNDPDMLVIGNFGLSWNQQVTQMALWAIMAAPLFMSNDLRHISPQAKALLQDKDVIAINQDPLGKQGYQLRQGDNFEVWERPLSGLAWAVAMINRQEIGGPRSYTIAVASLGKGVACNPACFITQLLPVKRKLGFYEWTSRLRSHINPTGTVLLQLENTMQMSLKDLL

SEQ ID NO: 279 - DNA, 1660 bp, Homo sapien
  unsure 1579, 1584, 1652: unknown base
tgttcagtcccccgaggtccatgcaggttacaagtggcaccccaaacagcaacaggatcgggtgctctgcatagtggcatccgaacacaggacttcgaggacatgaatgaagaaagtccgctggagcagaggaactgaaatgacaaggcgaatggggaccccgaaacgagtctgccagcagcagagataaggtcagtgccctaaagaggtactgatcagtgccgtaaagaggtactgggagcagtgctttaaagaagtactaggaacaggaagttttctgaatcaggctaacaaggggaagaatttgtctattgaagaaaaacattatgtgcagttgcttaaagttctgtagagacagtctggagcttaggttaattcgcagacactaacctcctgcagaagccacaaaaggttattacgcataacccatggttcccacaggcaggcatccttgatatggaaaattgagacaaagcaggagaaggattaaaacaggctcatcaaaaaggtcttagctgattcttagttgattcttctgttttctccacttggagtttagtttgtactgtacttctaccattatctccttattattctgtgggacaacagcctgaatctaaaaatctgaaagaatatgttgtcccacccacagctccaattgaaaataaaaaacagagaggataaaaattggcctataccgcctcctccaattgcagaaacatctgtactgcctccttcagtagcacaaatagaaaccccaatacaaagaattttacgctctgctgtcatagctggagagcccttaggaccttgcgctgttcctgtttccataaggcctgatcccaataatccacagcagtttattcatgaacacaccccactagaatttcagttgttgaaggaattaaaaactagtgtggtcaataatggagtacaaagcccatggttcccagaggaaagaacactagatgtagaactctgggaacaagtggggagaaatcttaaacaacatcaggtgcaaaggcatcaggtcccagtaaaatctttaatgttatgggctttaattagagcagccctggctcagttacacacagaagagcctaaaaagaggaaggaggagaaaatgtcacctgccttatcacctcctcttccctcagtcccaatatcactgggtcaaaataacaggaaacggaggtctcacctaagtctcctcctccaatagataggaaaaaggacagaggatatgctatagccatcagtgtgttagatatgagttctaaatttctctttaaagaatcagtatgtcagtatgttcaattctttgccttctacttctaaacttaacttcctcataaagcaacctttttcgattacctgctccatcctgactcattccgatttcctgctctgccataaccatttttcccgccaaaccactcaccctgtcactctctttaaattagccagttggagttagtttggcctgtgtggtctaaccctagccaataggggaatgacacagcagcaggggccatgtgcatcagggataagaaccctttccctcccttgtccaggtgtncactnaaccattgctccatctgtaaggcgcacccttctgtagaagtacattgacttgctgagaattaaaaagnacatttta

SEQ ID NO: 280 - protein, 195 aa, Homo sapien [sequence omitted]

SEQ ID NO: 281 - DNA, 384 bp, Homo sapien
atgcctaaatcaaaggaacttgtttcttcaagctcttctggcagtgattctgacagtgaggttgacaaaaagttaaagaggaaaaagcaagttgctccagaaaaacctgtaaagaaacaaaagacaggtgagacttcgagagccctgtcatcttctaaacagagcagcagcagcagagatgataacatgtttcagattgggaaaatgaggtacgttagtgttcgcgattttaaaggcaaagtgctaattgatattagagaatattggatggatcctgaaggtgaaatgaaaccaggaagaaaaggtatttctttaaatccagaacaatggagccagctgaaggaacagatttctgacatagatgacgcagtaagaaagctgtaa

SEQ ID NO: 282 - protein, 127 aa, Homo sapien
MPKSKELVSSSSSGSDSDSEVDKKLKRKKQVAPEKPVKKQKTGETSRALSSSKQSSSSRDDNMFQIGKMRYVSVRDFKGKVLIDIREYWMDPEGEMKPGRKGISLNPEQWSQLKEQISDIDDAVRKL

SEQ ID NO: 283 - DNA, 602 bp, Homo sapien
gacgcggggccggaacgcgaagagggtggtggagtcgggctacccactgattttccttcccttacttcccctgagcccttgggcccacttcccagcctaccgcttccgtccccgcccgactcttgggccagcgcctgggcccacactttcctatcccccgcagatgccggtggccgtgggtccctacggacagtcccagccaagctgcttcgaccgtgtcaaaatgggcttcgtgatgggttgcgccgtgggcatggcggccggggcgctcttcggcaccttttcctgtctcaggatcggaatgcggggtcgagagctgatgggcggcattgggaaaaccatgatgcagagtggcggcacctttggcacattcatggccattgggatgggcatccgatgctaaccatggttgccaactacatctgtcccttcccatcaatcccagcccatgtactaataaaagaaagtctttgagtaaaaaaaaaaaaaaaaaaaaaaaaaaaaaaaaaaaaaaaaaaaaaaaaaaaaaaaaaaaaaaaaaaaaaaaaaaaaaaaaaaaaaaaaaaaaaaaaaaaaaaaaaaaaaaaaaaaaaaaaaaaaaa

SEQ ID NO: 284 - protein, 79 aa, Homo sapien
MPVAVGPYGQSQPSCFDRVKMGFVMGCAVGMAAGALFGTFSCLRIGMRGRELMGGIGKTMMQSGGTFGTFMAIGMGIRC

SEQ ID NO: 285 - DNA, 2555 bp, Homo sapien
gcgcccagcctgccagccgcgctgctgctgctcctcctgctgtgggaccgctgaccgcgcggctgctccgctctccccgctccaagcgccgatctgggcacccgccaccagcatggacgctcgccgcgtgccgcagaaagatctcagagtaaagaagaacttaaagaaattcagatatgtgaagttgatttccatggaaacctcgtcatcctctgatgacagttgtgacagctttgcttctgataattttgcaaacacgaggctgcagtcagttcgggaaggctgtaggacccgcagccagtgcaggcactctggacctctcagggtggcgatgaagtttccagcgcggagtaccaggggagcaaccaacaaaaaagcagagtcccgccagccctcagagaattctgtgactgattccaactccgattcagaagatgaaagtggaatgaattttttggagaaaagggctttaaatataaagcaaaacaaagcaatgcttgcaaaactcatgtctgaattagaaagcttccctggctcgttccgtggaagacatcccctcccaggctccgactcacaatcaaggagaccgcgaaggcgtacattcccgggtgttgcttccaggagaaaccctgaacggagagctcgtcctcttaccaggtcaaggtcccggatcctcgggtcccttgacgctctacccatggaggaggaggaggaagaggataagtacatgttggtgagaaagaggaagaccgtggatggctacatgaatgaagatgacctgcccagaagccgtcgctccagatcatccgtgacccttccgcatataattcgcccagtggaagaaattacagaggaggagttggagaacgtctgcagcaattctcgagagaagatatataaccgttcactgggctctacttgtcatcaatgccgtcagaagactattgataccaaaacaaactgcagaaacccagactgctggggcgttcgaggccagttctgtggcccctgccttcgaaaccgttatggtgaagaggtcagggatgctctgctggatccgaactggcattgcccgccttgtcgaggaatctgcaactgcagtttctgccggcagcgagatggacggtgtgcgactggggtccttgtgtatttagccaaatatcatggctttgggaatgtgcatgcctacttgaaaagcctgaaacaggaatttgaaatgcaagcataatatctggaaaatttgctgcctgccttctacttctcaaatctttcttgtaaaagtttccaattttttcactgaaacctgagttaaaaatcttgatgatcagcctgtttcataagaaactccaatcaagttaatcttagcagacatgtgtttctggagcatcacagaaggtatattgctagttacactttgccctcctgcagtttcttctctgctcccaacccccatctcatagcatccccctctatttccaatgctcctctccaaccgcttagtttctgaatttcttttaaattacagttttatgaaagcatattttatttacttggtgttgaaatagccctcataaaacctaagcacttggaaacacaataatagtattaactaactagatctattgaatttcagagaagagccttctaacttgtttacacaaaaacgagtatgatttagcattcatactagttgaaatttttaatagaatcaaggcacaaaagtcttaaaaccatgtggaaaaattaggtaattattgcagattgatgtctctcaatcccatgtattgcgcttatgttacaagttgttgtcacagttgagacttaatttctcctaatttcttctgcccgaagggtaagtggtgcgtccagcttacacaatcataattcaaaggttggtgggcaatgtaatacttaattaaaataatgatggaagagctatctggagattatgagtaagctgatttgaattttcagtataaaactttagtataattgtagtttgcaaagtttatttcagttcacatgtaaggtattgcaaataaattcttggacaattttgtatggaaacttgatattaaaaactagtctgtggttctttgcagtttcttgtaaatttataaaccaggcacaaggttcaagtttagattttaagcacttttataacaatgataagtgcctttttggagatgtaacttttagcagtttgttaacctgacatctctgccagtctagtttctgggcaggtttcctgtgtcagtattccccctcctctttgcattaatcaaggtatttggtagaggtggaatctaagtgtttgtatgtccaatttacttgcatatgtaaaccattgctgtgccattcaatgtttgatgcataattggaccttgaatcgataagtgtaaatacagcttttgatctgtaatgcttttatacaaaagtttattttaataataaaatgtttgttctaacttgtctgcttttttaaaaataatcttactgtacttaattctaattttttcctcatatttaaataaaaggccatttccaccttttct

SEQ ID NO: 286 - protein, 371 aa, Homo sapien
MDARRVPQKDLRVKKNLKKFRYVKLISMETSSSSDDSCDSFASDNFANTRLQSVREGCRTRSQCRHSGPLRVAMKFPARSTRGATNKKAESRQPSENSVTDSNSDSEDESGMNFLEKRALNIKQNKAMLAKLMSELESFPGSFRGRHPLPGSDSQSRRPRRRTFPGVASRRNPERRARPLTRSRSRILGSLDALPMEEEEEEDKYMLVRKRKTVDGYMNEDDLPRSRRSRSSVTLPHIIRPVEEITEEELENVCSNSREKIYNRSLGSTCHQCRQKTIDTKTNCRNPDCWGVRGQFCGPCLRNRYGEEVRDALLDPNWHCPPCRGICNCSFCRQRDGRCATGVLVYLAKYHGFGNVHAYLKSLKQEFEMQA

SEQ ID NO: 287 - DNA, 1090 bp, Homo sapien
gctccgggagacttccggcagggcgggcgcggggtcttggcgaacggtcttcggaagcggcggcggcgcgatgaccacgctacgggcctttacctgcgacgacctgttccgcttcaacaacattaacttggatccacttacagaaacttatgggattcctttctacctacaatacctcgcccactggccagagtatttcattgttgcagaggcacctggtggagaattaatgggttatattatgggtaaagcagaaggctcagtagctagggaagaatggcacgggcacgtcacagctctgtctgttgccccagaatttcgacgccttggtttggctgctaaacttatggagttactagaggagatttcagaaagaaagggtggattttttgtggatctctttgtaagagtatctaaccaagttgcagttaacatgtacaagcagttgggctacagtgtatataggacggtcatagagtactattcggccagcaacggggagcctgatgaggacgcttatgatatgaggaaagcactttccagggatactgagaagaaatccatcataccattacctcatcctgtgaggcctgaagacattgaataaccctgggcagtggttcttaggcagatactctagatgctttatggacaatattattttcattggatgattctggagctctattaggagaaaagtaatcattttaggtcttaaagacttcaagaaaatacaggttatcaatttattttaaatctcattgtttccagttagcaatatcatacctattaaagctgttcattgtaacaaaattcaatcaaaaaggcagctaggtcagaaggaaacataccactctcatggttcatagtattcactgtatgtatgctagggaaaagacttgctccagtctcctcctcagttctgtgcctgagaaccactgctgcatatatttgtttttaaattttgtattgaactgttaattgaagctttaaaagcatatatgaaatgtataaatctaagatgtataatacattattgactctaaaaaaaaaaaaaaaaaaaaaaaaaaaaaaaaaaaaaaaaaaaaaa

SEQ ID NO: 288 - protein, 178 aa, Homo sapien
MTTLRAFTCDDLFRFNNINLDPLTETYGIPFYLQYLAHWPEYFIVAEAPGGELMGYIMGKAEGSVAREEWHGHVTALSVAPEFRRLGLAAKLMELLEEISERKGGFFVDLFVRVSNQVAVNMYKQLGYSVYRTVIEYYSASNGEPDEDAYDMRKALSRDTEKKSIIPLPHPVRPEDIE

SEQ ID NO: 289 - DNA, 1282 bp, Homo sapien
gtgctcggcgttgagctcctgcagccgccgccgctgcagtggtcgtccctgccctccccggccccggggtgcaccccgcaaggctcccgctggtgtccctggagcatgggaggctgctgagcgtgagtggcggtgtctggcaggagctgcgtggcagggagggcgtccatggctgcagccaacaagggcaacaagcccagagtccggggtatccgctttgcggcaggccacgatgcagaaggatcccacagccacgtccactttgatgagaagctgcatgactcggtggtcatggtcacccaggagagtgacagcagctttctggtcaaggttggcttcctgaagatcctgcacaggtatgagattaccttcactctgcccccagtgcacaggctgagcaaggatgtccgcgaggcacctgtccccagcctgcacctcaagctcctcagcgtggtgcccgtccctgaaggttatagtgtcaagtgtgagtactcggcgcacaaagagggcgtcctcaaagaggagatactgctagcctgcgaaggtggcactggcacctgtgtgcgcgtgacggtgcaggcccgcgtcatggaccggcaccacggcacgcccatgctgctggatggtgtcaagtgtgtgggcgccgagctggaatacgactcagagcacagcgactggcacggctttgactgaggcccgaggccccgcctgccccgggcccctcagccttaaaccccgccttgtccccccgacatgctgcgtgatggtgtggcttcctcgcccctctctggggtgggtgtgggggtggagtggccttgcccacgcctctcacctctgccttcatttgtgctgccaccctgcccctccctcgtcctcctctcccacttcctcctctctgtgtgcctcagtctcctgccggaagaaatgggttgatcccgaaaggaggctgtctgaggaagggagagggagggcctggggtgggtcccccactccccaccccaagccacagggactcccaccagggtctgggagaggacggagctggctctgtggcgtcgtggccccattactgctgccttgcttcagccacctctcctgcccctccctagtccccactgctgtccaccatgagtaggagggaggtgcagtccccagcccccacccctcaggtctgtgttacttggtttttaagcgactggttgggatagaaccctaaagaaataaacttccagtggataaaaaaaaaaaaaaaaaaaaaaaaaaaaaaaaaaaaaaaaaaaaa

SEQ ID NO: 290 - protein, 174 aa, Homo sapien
MAAANKGNKPRVRGIRFAAGHDAEGSHSHVHFDEKLHDSVVMVTQESDSSFLVKVGFLKILHRYEITFTLPPVHRLSKDVREAPVPSLHLKLLSVVPVPEGYSVKCEYSAHKEGVLKEEILLACEGGTGTCVRVTVQARVMDRHHGTPMLLDGVKCVGAELEYDSEHSDWHGFD

SEQ ID NO: 291 - DNA, 1499 bp, Homo sapien
ctgagcggcggggggcagtgtcgcctcggtctaggcacggcggcggagtcggtggtccctgcgcgatggccacctcggtgttgtgctgcctgcggtgctgcagagacggggggactggccacatccctctgaaggagatgccggccgtgcagctggacacgcagcacatgggaacagatgttgttattgtaaagaatggaagaagaatatgtggaacaggaggttgtttagccagcgcacctttacatcaaaacaaaagctattttgaattcaaaatccagtccacaggaatctggggtattggtgttgcaactcagaaggttaacttgaatcagattcctcttggccgagatatgcacagtctggtgatgagaaatgatggagccctttaccacaacaatgaagagaaaaataggctgccagcaaacagtcttccgcaggaaggagatgtggtgggtattacttatgaccatgtcgaattaaatgtatacttgaatggaaaaaacatgcattgtccagcatcaggtatacgagggacagtgtatccagttgtttatgttgatgacagtgcaattttggattgccagttcagtgagttttatcatacgcctccacctggttttgaaaaaatattatttgaacagcaaatcttctgaatgtatttgtttttaaaacttgtatttctgcactgttaaaaaatgttcatcatttaataaaactttacctggcctatagatgaaaatatattcttaaaaatatgcttgttgatgccgtctaaggaaccaatgtattcagtataccaccctgaagttgtgatttaaaatactttatgttttgtgaaatgaaaataagcatttgggcagtttatttaattcttatttaaataaatagaattatgggtttaattaacagtataacatgactatatatacatatatatttaaagggaattctttcttacataatatatttgttttgatagagatgtagagttgggtgggtgtttttgtcactctgaagtttagacctcattaaatatttgacatctacagttggataattttgccgcttagtgtccttttttatatacaatataacaaagtgagagaaatttatattactggcaatttcatttttggcagtctatttctgtatcatgtaccgcttttcttaaaacttaaattgcttattttgttgtgtaatgtcattgcttttgatttgctttgtgaaaggagataaacgtttcagtaattgtcagagcattttgttgcctcaggctgtgttacctcaatttcagagtaagtagtggttgattagtaatgtagtatacactggcagacatctagaatagtatgatgctttacatttaaatgaggttattcttttaaggacttttatttgtatgttttctgtaaggaataataaaataattgtaattaaggaatataccatactatattaaacacattcttcctaaaaaaaaaaaaaaaaaaaaaaaa

SEQ ID NO: 292 - protein, 217 aa, Homo sapien
ERRGAVSPRSRHGGGVGGPCAMATSVLCCLRCCRDGGTGHIPLKEMPAVQLDTQHMGTDVVIVKNGRRICGTGGCLASAPLHQNKSYFEFKIQSTGIWGIGVATQKVNLNQIPLGRDMHSLVMRNDGALYHNNEEKNRLPANSLPQEGDVVGITYDHVELNVYLNGKNMHCPASGIRGTVYPVVYVDDSAILDCQFSEFYHTPPPGFEKILFEQQIF

SEQ ID NO: 293 - DNA, 2739 bp, Homo sapien
aagaatgtctcaggaggaagcatgacagagatgtttgtccagttaaaactgggagatcagaggtataaaagtaaggatgggcattttggacattgaagtgtggggaaaggacaacaaaaagcatgaggaacgtctgggcacgtgtaaagtggatatctcggcactccctctgaagcaagccaactgcctggagctgccactggacagctgtctgggggctctccttatgttggtcacacttacaccctgtgcgggggtctccgtctctgatctgtgtgtctgccccttagcagacctcagcgaaagaaagcagattacccagcgatattgcttacagaactccctgaaagatgtgaaagacgtcggcattctacaagtgaaggttttaaaggcagcagatctcttagcggcagatttctcagggaagagtgacccattttgcttgttggagttaggcaatgaccgacttcagacgcataccgtctacaaaaacctcaaccctgaatggaacaaagtttttacatttcccattaaagatatccatgatgttttggaagtgacagtgtttgatgaagatggagataaacccccagattttcttggaaaagttgccattcccttgctgtccattagagatggacaaccgaattgttatgtactaaagaataaagatttagaacaagcttttaaaggagttatttacttagagatggaccttatatataatccggtgaaagcaagtattaggacttttactccccgggaaaagcgctttgttgaagacagccgcaagctgtccaaaaagatcttatcaagagatgtggaccgtgtgaaaagaatcactatggcaatatggaatacaatgcagttccttaaaagctgcttccagtgggaatccacattaagaagtacaatagcattcgcggtatttttgatcactgtctggaattttgaactatatatgatccccttggcattgttgctgatctttgtctacaatttcatcagacctgtgaaaggcaaggtcagcagcatccaggacagccaggagagcacagacatagatgacgaggaggatgaagatgacaaggaatctgagaaaaaggggttgattgaaagaatctatatggtacaggatattgtttcaactgttcaaaacgtcttggaggaaatagcttcttttggagaaaggattaagaacacatttaactggacggtccccttcctttcatctctggcctgtttgattctggcagcagccaccatcattttgtatttcattccactgcggtacatcattttaatctggggcataaataaatttactaagaagcttcgaaatccctattccatcgacaataatgagctactagacttcctctctagggtaccgtctgatgttcaaaaggtgcagtatgcagaattgaaactctgcagcagccacagccccctgcggaagaagcgcagcgctctctagggcacacaccgactttggacagcagcacccaatattgtgtttggttgagtagaccaatgttatggctgtttcagtggtacccaaggtgtccttctgaaatgcatgccctgtggcaccctctgtatacttcctcctccttcacgtgcacagacatacacacatgtgcacacaccctcatgcatgggtgtcctagttgcgtagagggtcagcccagcgaaaagcaacaaccccaagactgtgaaagactaacatccattctgaaataggagataacaaggctgccatggatctgaacaccaccttccttgagaacagccaggagcccacttggattcaagagtgactttgaacttgttttcacacctccaacagactctcattaagattcagttatttccgctccccagccccacactcctttcagattatcgttcatgggcgtaagtctcttctcagagttaacaagtctttggtagtcatcctctgtccaaatattgtatattattaaaaggcatttttaataattaccagaattagctcaaacctttagggatctttcagccatgattattaaggatatgtatgtgaatttttgggaaacctctcggtgctggatgccagcctacagcagggtccattgctggcaatggatggcccaggaaggtccctagagatcactcacttgaaaaatgagggtcccatgaaagtatttggttgccttctgatgccacttcttctcactttactttttgcttattttcaaaatattataaaatgtcaacatataatttcagaaaggcaggtgggggtaggggagaaatgaatgaataaattctctaggtatctagaaagataagaaactgaagaccgagagactaataaggctgcttacctaattattataatcatttcatttgcctgaatgttttaagcaggaagtagaaatactttggctgcccaaatgtatcttttgttcctcttagaagtaaaataagctacatacaataaaaatttatttcagaaccccatttctagaaaataccaccccagagtcctcatttgatagcatctgtctcctgcagacctcatcattccacagtatttccctgccatgtaaaaatcctgactttgtgcgtatataaaatgtatgcaattaagtctgtttaaatgatatttaagttttaaagactgtattttgttgacacatactttgtgcagtttttatgtatgtatgtattataaaaaaagttaaggttaaaaac

SEQ ID NO: 294 - protein, 466 aa, Homo sapien
MGILDIEVWGKDNKKHEERLGTCKVDISALPLKQANCLELPLDSCLGALLMLVTLTPCAGVSVSDLCVCPLADLSERKQITQRYCLQNSLKDVKDVGILQVKVLKAADLLAADFSGKSDPFCLLELGNDRLQTHTVYKNLNPEWNKVFTFPIKDIHDVLEVTVFDEDGDKPPDFLGKVAIPLLSIRDGQPNCYVLKNKDLEQAFKGVIYLEMDLIYNPVKASIRTFTPREKRFVEDSRKLSKKILSRDVDRVKRITMAIWNTMQFLKSCFQWESTLRSTIAFAVFLITVWNFELYMIPLALLLIFVYNFIRPVKGKVSSIQDSQESTDIDDEEDEDDKESEKKGLIERIYMVQDIVSTVQNVLEEIASFGERIKNTFNWTVPFLSSLACLILAAATIILYFIPLRYIILIWGINKFTKKLRNPYSIDNNELLDFLSRVPSDVQKVQYAELKLCSSHSPLRKKRSAL

SEQ ID NO: 295 - DNA, 629 bp, Homo sapien
gctgggagtacaggcaacgggaaggattatggaaaagactacacacttatttttcacttgcaaagaaaacctaggctggaactccaaatcaaagaagtggacgaatttggaaactatagttgccctcattacaaaggcaccattgtcgtttataaagtacctaaaggaaagatagtccccaacttgaatcaatctctcgtaattaatgaaaaccattctcagttgccaatttgcaaattaccattgaaattgccaaagcataagaaattaatcaaccgtacacagagtaccaaaagagtttctaaggatcctgtagaagccctttgggataacttgctccattggctggctgaggagctctcagaagaaaatgctgagtctctttcctcaactctccctctgcgccgtagcaccattcagctcatcaaactcaagaaccctgatgatctcacagaacagatccacgagtttctttgcttctggaaaaaatcgcttccaactttcaccgacaaacttcgcctcctggctcgacatctccgcaagattggcaggagtgatcttgcagaagagctcaaattcaagtgggaaaataaagtgttcactgaaccacagcagtgttttgatgtaaa

SEQ ID NO: 296 - protein, 208 aa, Homo sapien
AGSTGNGKDYGKDYTLIFHLQRKPRLELQIKEVDEFGNYSCPHYKGTIVVYKVPKGKIVPNLNQSLVINENHSQLPICKLPLKLPKHKKLINRTQSTKRVSKDPVEALWDNLLHWLAEELSEENAESLSSTLPLRRSTIQLIKLKNPDDLTEQIHEFLCFWKKSLPTFTDKLRLLARHLRKIGRSDLAEELKFKWENKVFTEPQQCFD

SEQ ID NO: 297 - DNA, 1677 bp, Homo sapien
aggttctcttacatcgaccgcctaagagtcgcgctgtaagaagcaacaacctctcctcttcgtctccgccatcagctcggcagtcgcgaagcagcaaccatgcgtgagtgcatctccatccacgttggccaggctggtgtccagattggcaatgcctgctgggagctctactgcctggaacacggcatccagcccgatggccagatgccaagtgacaagaccattgggggaggagatgattccttcaacaccttcttcagtgagacgggggctggcaagcatgtgccccgggcagtgtttgtagacttggaacccacagtcattgatgaagttcgcactggcacctaccgccagctcttccaccctgagcaacttatcacaggcaaagaagatgctgccaataactatgcccgagggcactacaccattggcaaggagatcattgacctcgtgttggaccgaattcgcaagctggccgaccagtgcacgggtctccagggcttcttggttttccacagctttggtgggggaactggttctgggttcacctcgctgctcatggaacgtctctcagttgattatggcaagaagtccaagctggagttctctatttacccggcgccccaggtttccacagctgtagttgagccctacaactccatcctcaccacccacaccaccctggagcactctgattgtgccttcatggtagacaatgaggccatctatgacatctgtcgtagaaacctcgatattgagcgtccaacctatactaacctgaataggttaataggtcaaattgtgtcctccatcactgcttccctgagatttgatggagccctgaatgttgacctgacagaattccagaccaacctggtgccctatccccgcatccacttccctctggccacatatgcccctgtcatctctgctgagaaagcctaccatgaacagctttctgtagcagagatcaccaatgcttgctttgagccagccaaccagatggtgaaatgtgaccctcgccatggtaaatacatggcttgctgcctgttgtaccgtggtgacgtggttcccaaagatgtcaatgctgccattgccaccatcaagaccaagcgtaccatccagtttgtggattggtgccccactggcttcaaggttggcatcaactaccagcctcccactgtggtgcctggtggagacctggccaaggtacagagagctgtgtgcatgctgagcaacaccacagccattgctgaggcctgggctcgcctggaccacaagtttgacctgatgtatgccaaacgtgcctttgttcactggtacgttggggaggggatggaggaaggtgagttttcagaggcccgtgaggacatggctgcccttgagaaggattatgaggaggttggtgtggattctgttgaaggagagggtgaggaagaaggagaggaatactaaagttaaaacgtcacaaaggtgctgcttttacagggaagcttattctgttttaaacattgaaaagttgtggtctgatcagttaatttgtatgtagcagtgtatgctctcatatacaattactgacctatgctctaaaacatgaatgctttgttacagacccaagctgtccatttctgtgatgggttttgaataaagtattccctgtcttaaaaaaaaaaaaaa

SEQ ID NO: 298 - protein, 451 aa, Homo sapien
MRECISIHVGQAGVQIGNACWELYCLEHGIQPDGQMPSDKTIGGGDDSFNTFFSETGAGKHVPRAVFVDLEPTVIDEVRTGTYRQLFHPEQLITGKEDAANNYARGHYTIGKEIIDLVLDRIRKLADQCTRLQGFLVFHSFGGGTGSGFTSLLMERLSVDYGKKSKLEFSIYPAPQVSTAVVEPYNSILTTHTTLEHSDCAFMVDNEAIYDICRRNLDIERPTYTNLNRLIGQIVSSITASLRFDGALNVDLTEFQTNLVPYPRIHFPLATYAPVISAEKAYHEQLSVAEITNACFEPANQMVKCDPGHGKYMACCLLYRGDVVPKDVNAAIATIKTKRTIQFVDWCPTGFKVGINYQPPTVVPGGDLAKVQRAVCMLSNTTAIAEAWARLDHKFDLMYAKRAFVHWYVGEGMEEGEFSEAREDMAALEKDYEEVGVHSVEGEGEEEGEEY

SEQ ID NO: 299 - DNA, 848 bp, Homo sapien
cacgctgctacttattttcttgaatatggatacacggtactgtttatgtaatacttatgtacttatataatatgtaaaacactgcataacagataacatgaaaaagagctctggtatagtatgaaacatgattccaaaacatggtatcaagtatgatggattcatattaggttattggagaaaagtaaagtattttgaaacacacctttacatgtttatcttagcatctggaaagacaaccgttatcttcttacaacatacttcttggtaccaatttcggagataaaattctagattggctaggccacggttctgacccagtgtggaaattcttatgccttaaggaactaaacttaaaatataaaggattcacagactatttataaatttacaagaatatttgctttgttcgaatacctgttttcatacaggaatttaatataacattaatatactggagtccaccagcattttaggaaacttctttgagattttgaaactcctttgaaaacttcttgagattttgaaaatcaaagaattatttgtggaaaagggaagaaaatgccttcattcaacacgtttattggaccctgaatgtgtgagacattgttgtaggtagcgtagatacagatatgtgctaaataaatacatacataagaccattatccctggagagcttttgatctgctgtgggagagaaagtttgtagtgtgatgcagaggtgtgactaaactgccatggagatgggatggagtagctgacctttgaaatcaaggatgaattctagttttacaggatgaagggcacgggtggcaggaagacattccaggcatatagtatagtgtatt

SEQ ID NO: 300 - protein, 52 aa, Homo sapien
MIPKHGIKYDGFILGYWRKVKYFETHLYMFILASGKTTVIFLQHTSWYQFRR

SEQ ID NO: 301 - DNA, 2525 bp, Homo sapien
ttttcccgcgaaactcggcggctgagcgtggaggttcttgtctcccctggtttgtgaagtgcggaaaaccagaggcgcagtcatgtcgggattcgacgatcctggcattttctacagcgacagcttcgggggcgacgcccaggccgacgaggggcaggcccgcaaatcgcagctgcagaggcgcttcaaggagttcctgcggcagtaccgagtgggcaccgaccgcacgggcttcaccttcaaatacagggatgaactcaagcggcattacaacctgggggagtactggattgaggtggagatggaggatctggccagctttgatgaggacctggccgactacttgtacaagcagccagccgagcacctgcagctgctggaggaagctgccaaggaggtagctgatgaggtgacccggccccggccttctggggaggaggtgctccaggacatccaggtcatgctcaagtcggacgccagcccttccagcattcgtagcctgaagtcggacatgatgtcacacctggtgaagatccctggcatcatcatcgcggcctctgcggtccgtgccaaggccacccgcatctctatccagtgccgcagctgccgcaacaccctcaccaacattgccatgcgccctggcctcgagggctatgccctgcccaggaagtgcaacacagatcaggctggacgccccaaatgcccattggacccgtacttcatcatgcccgacaaatgcaaatgcgtggacttccagaccctgaagctgcaggagctgcctgatgcagtcccccacggggagatgcccagacacatgcagctctactgcgacaggtacctgtgtgacaaggtcgtccctgggaacagggttaccatcatgggcatctactccatcaagaagtttggcctgactaccagcaggggccgtgacagggtgggcgtgggcatccgaagctcctacatccgtgtcctgggcatccaggtggacacagatggctctggccgcagctttgctggggccgtgagcccccaggaggaggaggagttccgtcgcctggctgccctcccaaatgtctatgaggtcatctccaagagcatcgccccctccatctttgggggcacagacatgaagaaggccattgcctgcctgctctttgggggctcccgaaagaggctccctgatggacttactcgccgaggagacatcaacctgctgatgctaggggaccctgggacagccaagtcccagcttctgaagtttgtggagaagtgttctcccattggggtatacacgtctgggaaaggcagcagcgcagctggactgacagcctcggtgatgagggacccttcgtcccggaatttcatcatggagggcggagccatggtcctggccgatggtggggtcgtctgtattgacgagtttgacaagatgcgagaagatgaccgtgtggcaatccacgaagccatggagcagcagaccatctctatcgccaaggctgggatcaccaccaccctgaactcccgctgctccgtcctggctgctgccaactcagtgttcggccgctgggatgagacgaagggggaggacaacattgacttcatgcccaccatcttgtcgcgcttcgacatgatcttcatcgtcaaggatgagcacaatgaggtgagggatgtgatgctggccaagcatgtcatcactctgcacgtgagtgcactgacacagacacaggctgtggagggcgagattgacctggccaagctgaagaagtttattgcctactgccgagtgaagtgtggcccccggctgtcagcagaggctgcagagaaactgaagaaccgctacatcatcatgcggacggggcccgtcagcacgagagggacagtgaccgcgtccagcatccccatcactgtgcggcagttggaggccattgtgcgcatcgcggaagccctcagcaagatgaagctgcagcccttcgccacagaggcagatgtggaggaggccctgcggctcttccaagtgtccacgttggatgctgccttgtccggtaccctgtcaggggtggagggcttcaccagccaggaggaccaggagatgctgagccgcatcgagaagcagctcaagcgccgctttgccattggctcccaggtgtctgagcacagcatcatcaaggacttcaccaagcagaaatacccggagcacgccatccacaaggtgctgcagctcatgctgcggcgcggcgagatccagcatcgcatgcagcgcaaggttctctaccgcctcaagtgagtcgcgccgctcactggactcatggactcgccacgctcgccctccttgccgctgcctgccattgacaatgttgctgggacctctgcctccccactgcagccctcgaacttcccaggcaccctcctttctgccccagaggaaggagctgtagtgtcctgctgcctctgggcgcccgctctagcgggttctgggaagtgtgcttttggcatccgttaataataaagccacggtgtgttcaggt

SEQ ID NO: 302 - protein, 733 aa, Homo sapien
MSGFDDPGIFYSDSFGGDAQADEGQARKSQLQRRFKEFLRQYRVGTDRTGFTFKYRDELKRHYNLGEYWIEVEMEDLASFDEDLADYLYKQPAEHLQLLEEAAKEVADEVTRPRPSGEEVLQDIQVMLKSDASPSSIRSLKSDMMSHLVKIPGIIIAASAVRAKATRISIQCRSCRNTLTNIAMRPGLEGYALPRKCNTDQAGRPKCPLDPYFIMPDKCKCVDFQTLKLQELPDAVPHGEMPRHMQLYCDRYLCDKVVPGNRVTIMGIYSIKKFGLTTSRGRDRVGVGIRSSYIRVLGIQVDTDGSGRSFAGAVSPQEEEEFRRLAALPNVYEVISKSIAPSIFGGTDMKKAIACLLFGGSRKRLPDGLTRRGDINLLMLGDPGTAKSQLLKFVEKCSPIGVYTSGKGSSAAGLTASVMRDPSSRNFIMEGGAMVLADGGVVCIDEFDKMREDDRVAIHEAMEQQTISIAKAGITTTLNSRCSVLAAANSVFGRWDETKGEDNIDFMPTILSRFDMIFIVKDEHNEVRDVMLAKHVITLHVSALTQTQAVEGEIDLAKLKKFIAYCRVKCGPRLSAEAAEKLKNRYIIMRTGPVSTRGTVTASSIPITVRQLEAIVRIAEALSKMKLQPFATEADVEEALRLFQVSTLDAALSGTLSGVEGFTSQEDQEMLSRIEKQLKRRFAIGSQVSEHSIIKDFTKQKYPEHAIHKVLQLMLRRGEIQHRMQRKVLYRLK

SEQ ID NO: 303 - DNA, 4438 bp, Mus musculus
ccacgcgtccggggaagatgcccaggggacaggattgatgcatattcctgatcttccacaggagtggtcccgtaggcctcaccctctccgtccaccatctctactgcccgctctgctggttgggcctctggtgtatggacttgtacatgatgaactgtgaacttctagccacgtgtagcgcccttgggtacttggaaggagggacttaccacaaggagccggattgcctggagagtgtgaaggatttgatccgatacctgaggcacgaggatgagacccgagatgtgcggcagcagctgggagctgcacagatcctgcagagcgacctcctgccaatcctcacgcagcatcgccaggacaagcctctcttcgatgccgtgatcaggctgatggtaaatttgacacagccagccttgctctgttttggcagcgtgcctaaggactccagtgtacggcaccattttctgcaggttctaacgtacctgcaagcctacaaagaggcctttgccagtgagaaggcatttggagtcctcagcgagaccttgtatgaattgctacagctgggctgggaggatcggcaagaagaagacaacttgctgatcgagcggatccttctgctggtcagaaatattctccatgtcccggccaaccttgagcaggagaagagtatcgatgatgatgccagcatccacgaccgtctcctttgggcaattcacctcagtggcatggacgacttgctcctcttcctgtccagctcatccgccgagcagcagtggagcctccatgtgctggagatcatctccctcatgttccgagaccagacccctgagcagctagcgggagtagggcagggacgcttggctcaggagcgaagcacggatgtggcagaattggaggtgctgcgccaacgggagatggcggagaagagagctcgggccctccagcgaggaaacaggcactctcgatttgggggctcctacattgtccaggggttgaaatctattggggagaaggatgtcgtctttcacaaaggccttcacaatctccagaactacagctcagatctgggaaagcagcccaggagggtgcccaagcgtcgtcaggctgcccaggagctgtctgtccatcgccgctctgtcctgaatgtgagactcttcctcagagacttctgctctgagttcctggagaactgctacaacccgctcatgggcgcggtcaaggatcatctgcttcgggagagagcgcagcagcatgacgagacttactacatgtgggcaatggctttcttcatggccttcaaccgagctgccaccttccgccccggccttgtttctgagaccctcagtatccgtacctttcactttgtggagcagaacctcaccaactactacgagatgatgctgacagaccgcaaggaggccgcctcctgggcgcgcaggatgcacctggccctgaaggcctaccaggagctgctggccacggtgaacgagatggacatgtgcccagatgaggctgttagggagagcagtcgtatcatcaaaaacaacattttctatatgatggagtaccgagaactattcctggcgctctttcgaaagtttgatgagagataccatccacgctcattccttcgagacctggtggaaaccacccacctcttcctcaaaatgttggagcgcttttgccggagccgcgggaacctgatggtgcagaacaaaagaaaaaagaggaaaaagaaaaagaaggttcaggaccagggtgttgctttctcacaaagccccggggagctggaggccatgtggccagccctggcagagcagctgctgcagtgtgcccaggaccctgagctcagtgtggaccccgtcgttccctttgatgcggcctcagaggtgccagtggaggagcagcgggtagaagccatggtgaggatccaagactgccttacggctggccaggccccgcaagccctggccctcctgcggtctgcccgggaagtgtggcctgaaggaaatgcgtttggctctccagtcatttccccaggggaagaaatgcagttgctgaaacaaatcctctccacgccccttccccggcagcaggagccagaagaaggagatgcagaggaggaagaggaagaggaggaggaagaggagttacaggtggtccaggtgtcagagaaggagtttaactttctggaatacctgaaacgcttcgcatcctcaaccatcgtgcgggcctacgtgcttctcctgcggagctacaggcagaacagtgctcacaccaaccactgcatcgccaagatgctgcaccggctggcccatggcctggggatggaagccctgcttttccagctgtccctgttctgcctcttcaatcggctgcttagtgacccagctgctgcggcctacaaagagctagtgacttttgccaaatacatcattggcaagttctttgcgttggctgccgtgaaccagaaagcgtttgtggagctgctattctggaagaacaccgcagtggttcgggaaatgacccagggatatggctccctcgacagtgggtcttccagccacagagctcctctgtggagccctgaggaagaggcccagcttcaggaactatacctcgcccacaaggatgtggaaggtcaagatgtagtggaaaccatattggcgcacctgaaagtcgttcctcgaacacgcaagcaggtcatccaccacctggtccggatgggcctggccgacagcgtcaaggagttccagaagaggaaagggacccagattgtcttgtggacggaggaccaggagctggagttacagcggctctttgaggagttccgggactctgatgatgttcttggtcaaatcatgaagaatatcacagccaaacgttcacgggctcgagtagtggacaaactgttggccctggggttggtgtctgagcggaggcagctatacaagaaacggagaaagaagctggcgccttcttgcatgcagaatggagaaaagtccccgagagacccctggcaggaagatccggaagaggaagacgaacacttgccagaggacgaaagtgaagatgaggagagtgaggaaggcttgccatcaggacagggtcagggcagctcatctctctctgctgaaaacctcggtgagagccttcgtcaggaaggcctctctgctcccctcctgtggctccagagctccctgatccgagcagcaaatgaccgagaagaggatggctgctcccaggcaatccctctggtgcctctgacagaggaaaatgaggaagcaatggagaacgaacagtttcagcatctgctacgcaagctagggatccggccgcccagctcagggcaggaaaccttctggagaattccagccaaactgagctccacccagcttcggagggtggctgcttctttgagtcagcaagaaaacgaggaggaaagggaagaggagccagagccaggagtccccggagagcagggtcccagtgaggagcaccggacagaagccctgagagcccttctgtcagcccgtaagaggaaagcaggcctggggcctacagaagaggaggccactggggaggaagaatggaactcagcgcccaagaagcggcaactgctggacagcgacgaagaggaagatgatgaggggaggaggcaagcagtgtcgggaacgccaagagtccacaggaagaaacggtttcagattgaggatgaggatgactgaaagccagatgtgtttgaccgatgtgagttggaggcacaaaagctacttttgcctgcgttggaagcaatcttctctacattgacagcccaggaattttaggcagcagtgttgggtggagtctttgcggtcagtccttgccccaggttcatcagcgtgcacagccggtctctgggtccgtctcgtagcaaatgaagagtggcgaaaggttcaaggtggcttgtcctcctctaaggactgcgtcttggcttctgacggggagctttataacccagcacggttgttcattctgtcctcacaaagcactggattgctcccattttctttctttcatcccaggacacatgattgaacccgtttctacagttgagggagagctgggatgcaccactctcaagctgacaagcatccctgatttgtgtttcatattaaatgtgtacaattaacagttgctcatctcagaacggccagccagccatctgttgtgtcttcggaagaacttttaagagtaaaattaaaagacatgtcctgaactgagcttggtagtgtgagctaatcccatcgtgtgggagacagaggcaagagaattgccatgagggagaggaaagagtcatatagccctacgcgtgggccaataaatgtaatttaaaaaatcagcttgataataaatataatttttaaaaaaaaaaaaaaaaaaaaaaaaaaaaaaaaaa

SEQ ID NO: 304 - protein, 1197 aa, Mus musculus
MDLYMMNCELLATCSALGYLEGGTYHKEPDCLESVKDLIRYLRHEDETRDVRQQLGAAQILQSDLLPILTQHRQDKPLFDAVIRLMVNLTQPALLCFGSVPKDSSVRHHFLQVLTYLQAYKEAFASEKAFGVLSETLYELLQLGWEDRQEEDNLLIERILLLVRNILHVPANLEQEKSIDDDASIHDRLLWAIHLSGMDDLLLFLSSSSAEQQWSLHVLEIISLMFRDQTPEQLAGVGQGRLAQERSTDVAELEVLRQREMAEKRARALQRGNRHSRFGGSYIVQGLKSIGEKDVVFHKGLHNLQNYSSDLGKQPRRVPKRRQAAQELSVHRRSVLNVRLFLRDFCSEFLENCYNPLMGAVKDHLLRERAQQHDETYYMWAMAFFMAFNRAATFRPGLVSETLSIRTFHFVEQNLTNYYEMMLTDRKEAASWARRMHLALKAYQELLATVNEMDMCPDEAVRESSRIIKNNIFYMMEYRELFLALFRKFDERYHPRSFLRDLVETTHLFLKMLERFCRSRGNLMVQNKRKKRKKKKKVQDQGVAFSQSPGELEAMWPALAEQLLQCAQDPELSVDPVVPFDAASEVPVEEQRVEAMVRIQDCLTAGQAPQALALLRSAREVWPEGNAFGSPVISPGEEMQLLKQILSTPLPRQQEPEEGDAEEEEEEEEEEELQVVQVSEKEFNFLEYLKRFASSTIVRAYVLLLRSYRQNSAHTNHCIAKMLHRLAHGLGMEALLFQLSLFCLFNRLLSDPAAAAYKELVTFAKYIIGKFFALAAVNQKAFVELLFWKNTAVVREMTQGYGSLDSGSSSHRAPLWSPEEEAQLQELYLAHKDVEGQDVVETILAHLKVVPRTRKQVIHHLVRMGLADSVKEFQKRKGTQIVLWTEDQELELQRLFEEFRDSDDVLGQIMKNITAKRSRARVVDKLLALGLVSERRQLYKKRRKKLAPSCMQNGEKSPRDPWQEDPEEEDEHLPEDESEDEESEEGLPSGQGQGSSSLSAENLGESLRQEGLSAPLLWLQSSLIRAANDREEDGCSQAIPLVPLTEENEEAMENEQFQHLLRKLGIRPPSSGQETFWRIPAKLSSTQLRRVAASLSQQENEEEREEEPEPGVPGEQGPSEEHRTEALRALLSARKRKAGLGPTEEEATGEEEWNSAPKKRQLLDSDEEEDDEGRRQAVSGTPRVHRKKRFQIEDEDD

SEQ ID NO: 305 - DNA, 1949 bp, Homo sapien
atctgaacccaggaaagaaacccatttgccgaccccctcttccctctccagacaggtggagagcgggtgagggtctcgctcggctttccccctgcacctttcccaccctcccgcccgtccctgggggtcctccgtcaccgcggccatggcccagaagccgaaggtggacccccacgtcgggcggctgggatacctgcaggcgctggtcacggaattccaggagacccaaagccaagacgccaaggagcaagtcctcgccaacctcgccaacttcgcttatgaccccagcaactacgagtatctgcggcagctgcaggtcctggatttatttctcgattcgctgtcggaggagaatgagaccctggtggagtttgctattggaggcctgtgcaacctgtgcccagacagggccaacaaggagcacatcctgcacgcaggaggtgtcccactcatcatcaactgcctatccagccccaatgaggagacggtgctgtctgccatcaccacgctcatgcacctgagcccgccgggccgcagctttctcccagagctgaccgccacgcccgtggtgcagtgcatgcttcgcttctccctctcggccagcgccaggctccggaacctggcacagatcttcctggaggacttctgctccccccgccaggtggccgaggcccgcagccggcaggcgcactctgccctgggtatcccactgccgaggagcgtggccccacggcagcgctgatccatggagactgcgagaccgtggcacccctactgctggggaccacagtcctgatgtggacgcagggaacggggagcacatactgccccattggtgccttttcagccatctgaaaggcgggttctttcagcaggacaggcatttacactgatgaaacgccactgggagtgaggaagccagactccagagacacggagaagatcaaactggagctgcgttcataggctggcactctcaatcctacatcaggtgccaccaccaccagactcaggccctggtgtaagaagcggccaagtgcctggacccagaggctttgcaggacagtgttctcaggagctgggcctgaggcttaggagagctgccttcgctgcaggaaatcagggattatcccttaacagaagtgtctggagtagttttcaggtataggaatgagatgcctcgtggtgaaaggatctcaccctgggaagatgtggtgccccctccagggctctggaggatggatgcctcccccaggggctctccaagctgggcatttgggcctggtggatgccaacctggataacctgtggcccagcattgactgtccacccagccttgctgttaggcaccatgactccaagatgaagatgtggtccctgcctttgagtgacagcccagggacttaatgtggccatcgggcatcaagcacaaggccatgcaggtgatgatacgtcggaatagaggcaccagccctggtaactgcatcttctccccttgccaccccatggccccggctgaaagcttcggccctcctctgctgtcactcaatgatggggagccctaccccagaagtgtatcccacgagggcatcagggacgcagtgagtgttgctcaagggagtcaggaagagacggcaacgtaaaggatgtggctccatgtccatggtgccccctggtcaacataaggagcgtgggatccgatggaaaggtggagctcagggaaaatgggggtccttgcctctcgtgtaccccctcaaggctgaccccttagatggcccaggaatggcaggtgctacaaaaatggtacccacgtgggcatggaaatggggcagattaggggaccactggactcagaggggagggaagggctcatcagcacccgctcagggagcctgtccctttatgttcccaaataaagggtcctagaagactaaaaaaaaaaaaaaaaa

SEQ ID NO: 306 - protein, 198 aa, Homo sapien
MAQKPKVDPHVGRLGYLQALVTEFQETQSQDAKEQVLANLANFAYDPSNYEYLRQLQVLDLFLDSLSEENETLVEFAIGGLCNLCPDRANKEHILHAGGVPLIINCLSSPNEETVLSAITTLMHLSPPGRSFLPELTATPVVQCMLRFSLSASARLRNLAQIFLEDFCSPRQVAEARSRQAHSALGIPLPRSVAPRQR

SEQ ID NO: 307 - DNA, 1682 bp, Homo sapien
cggcagccagcctattctttggccgggtcggtgcgagtggtcggctgggcagagtgcacgctgcttggcgccgcaggctgatcccgccgtccactcccgggagcagtgatgttgggcaactctgcgccggggcctgcgacccgcgaggcgggctcggcgctgctagcattgcagcagacggcgctccaagaggaccaggagaatatcaacccggaaaaggcagcgcccgtccaacaaccgcggacccgggccgcgctggcggtactgaagtccgggaacccgcggggtctagcgcagcagcagaggccgaagacgagacgggttgcaccccttaaggatcttcctgtaaatgatgagcatgtcaccgttcctccttggaaagcaaacagtaaacagcctgcgttcaccattcatgtggatgaagcagaaaaagaagctcagaagaagccagctgaatctcaaaaaatagagcgtgaagatgccctggcttttaattcagccattagtttacctggacccagaaaaccattggtccctcttgattatccaatggatggtagttttgagtcaccacatactatggacatgtcaattgtattagaagatgaaaagccagtgagtgttaatgaagtaccagactaccatgaggatattcacacataccttagggaaatggaggttaaatgtaaacctaaagtgggttacatgaagaaacagccagacatcactaacagtatgagagctatcctcgtggactggttagttgaagtaggagaagaatataaactacagaatgagaccctgcatttggctgtgaactacattgataggttcctgtcttccatgtcagtgctgagaggaaaacttcagcttgtgggcactgctgctatgctgttagcctcaaagtttgaagaaatataccccccagaagtagcagagtttgtgtacattacagatgatacctacaccaagaaacaagttctgagaatggagcatctagttttgaaagtccttacttttgacttagctgctccaacagtaaatcagtttcttacccaatactttctgcatcagcagcctgcaaactgcaaagttgaaagtttagcaatgtttttgggagaattaagtttgatagatgctgacccatacctcaagtatttgccatcagttattgctggagctgcctttcatttagcactctacacagtcacgggacaaagctggcctgaatcattaatacgaaagactggatataccctggaaagtcttaagccttgtctcatggaccttcaccagacctacctcaaagcaccacagcatgcacaacagtcaataagagaaaagtacaaaaattcaaagtatcatggtgtttctctcctcaacccaccagagacactaaatctgtaacaatgaaagactgcctttgttttctaagatgtaaatcactcaaagtatatggtgtacagtttttaacttaggttttaattttacaatcatttctgaatacagaagttgtggccaagtacaaattatggtatctattactttttaaatggttttaatttgtatatcttttgtatatgtatctgtcttagatatttggctaattttaagtggttttgttaaagtattaatgatgccagctgtcaggataataaattgatttggaaaacttaaaaaaa

SEQ ID NO: 308 - protein, 432 aa, Homo sapien
MLGNSAPGPATREAGSALLALQQTALQEDQENINPEKAAPVQQPRTRAALAVLKSGNPRGLAQQQRPKTRRVAPLKDLPVNDEHVTVPPWKANSKQPAFTIHVDEAEKEAQKKPAESQKIEREDALAFNSAISLPGPRKPLVPLDYPMDGSFESPHTMDMSIVLEDEKPVSVNEVPDYHEDIHTYLREMEVKCKPKVGYMKKQPDITNSMRAILVDWLVEVGEEYKLQNETLHLAVNYIDRFLSSMSVLRGKLQLVGTAAMLLASKFEEIYPPEVAEFVYITDDTYTKKQVLRMEHLVLKVLTFDLAAPTVNQFLTQYFLHQQPANCKVESLAMFLGELSLIDADPYLKYLPSVIAGAAFHLALYTVTGQSWPESLIRKTGYTLESLKPCLMDLHQTYLKAPQHAQQSIREKYKNSKYHGVSLLNPPETLNL

SEQ ID NO: 309 - DNA, 1821 bp, Homo sapien
ggccggacagtccgccgaggtgctcggtggagtcatggcagtgccctttgtggaagactgggacttggtgcaaaccctgggagaaggtgcctatggagaagttcaacttgctgtgaatagagtaactgaagaagcagtcgcagtgaagattgtagatatgaagcgtgccgtagactgtccagaaaatattaagaaagagatctgtatcaataaaatgctaaatcatgaaaatgtagtaaaattctatggtcacaggagagaaggcaatatccaatatttatttctggagtactgtagtggaggagagctttttgacagaatagagccagacataggcatgcctgaaccagatgctcagagattcttccatcaactcatggcaggggtggtttatctgcatggtattggaataactcacagggatattaaaccagaaaatcttctgttggatgaaagggataacctcaaaatctcagactttggcttggcaacagtatttcggtataataatcgtgagcgtttgttgaacaagatgtgtggtactttaccatatgttgctccagaacttctgaagagaagagaatttcatgcagaaccagttgatgtttggtcctgtggaatagtacttactgcaatgctcgctggagaattgccatgggaccaacccagtgacagctgtcaggagtattctgactggaaagaaaaaaaaacatacctcaacccttggaaaaaaatcgattctgctcctctagctctgctgcataaaatcttagttgagaatccatcagcaagaattaccattccagacatcaaaaaagatagatggtacaacaaacccctcaagaaaggggcaaaaaggccccgagtcacttcaggtggtgtgtcagagtctcccagtggattttctaagcacattcaatccaatttggacttctctccagtaaacagtgcttctagtgaagaaaatgtgaagtactccagttctcagccagaaccccgcacaggtctttccttatgggataccagcccctcatacattgataaattggtacaagggatcagcttttcccagcccacatgtcctgatcatatgcttttgaatagtcagttacttggcaccccaggatcctcacagaacccctggcagcggttggtcaaaagaatgacacgattctttaccaaattggatgcagacaaatcttatcaatgcctgaaagagacttgtgagaagttgggctatcaatggaagaaaagttgtatgaatcaggttactatatcaacaactgataggagaaacaataaactcattttcaaagtgaatttgttagaaatggatgataaaatattggttgacttccggctttctaagggtgatggattggagttcaagagacacttcctgaagattaaagggaagctgattgatattgtgagcagccagaaggtttggcttcctgccacatgatcggaccatcggctctggggaatcctggtgaatatagtgctgctatgttgacattattcttcctagagaagattatcctgtcctgcaaactgcaaatagtagttcctgaagtgttcacttccctgtttatccaaacatcttccaatttattttgtttgttcggcatacaaataatacctatatcttaattgtaagcaaaactttggggaaaggatgaatagaattcatttgattatttcttcatgtgtgtttagtatctgaatttgaaactcatctggtggaaaccaagtttcaggggacatgagttttccagcttttatacacacgtatctcatttttatcaaaacattttgttt

SEQ ID NO: 310 - protein, 476 aa, Homo sapien
MAVPFVEDWDLVQTLGEGAYGEVQLAVNRVTEEAVAVKIVDMKRAVDCPENIKKEICINKMLNHENVVKFYGHRREGNIQYLFLEYCSGGELFDRIEPDIGMPEPDAQRFFHQLMAGVVYLHGIGITHRDIKPENLLLDERDNLKISDFGLATVFRYNNRERLLNKMCGTLPYVAPELLKRREFHAEPVDVWSCGIVLTAMLAGELPWDQPSDSCQEYSDWKEKKTYLNPWKKIDSAPLALLHKILVENPSARITIPDIKKDRWYNKPLKKGAKRPRVTSGGVSESPSGFSKHIQSNLDFSPVNSASSEENVKYSSSQPEPRTGLSLWDTSPSYIDKLVQGISFSQPTCPDHMLLNSQLLGTPGSSQNPWQRLVKRMTRFFTKLDADKSYQCLKETCEKLGYQWKKSCMNQVTISTTDRRNNKLIFKVNLLEMDDKILVDFRLSKGDGLEFKRHFLKIKGKLIDIVSSQKVWLPAT

SEQ ID NO: 311 - DNA, 2179 bp, Homo sapien
gcatgaggagagtgtgtaggggccgggttccgtggatgaactctcacccgagcggtttctctttccgggacaacatggcgccgtccacgccgctcttgacagtccgaggatcagaaggactgtacatggtgaatggaccaccacattttacagaaagcacagtgtttccaagggaatctgggaagaattgcaaagtctgtatctttagtaaggatgggaccttgtttgcctggggcaatggagaaaaagtaaatattatcagtgtcactaacaagggactactgcactccttcgatcttctgaaggcagtttgccttgaattctcacccaaaaatactgtcctggcaacgtggcagccttacagtacttctaaagatggcacagctgggatacccaacctacaactttatgatgtgaaaactgggacatgtttgaaatctttcatccagaaaaaaatgcaaaattggtgtccatcctggtcagaagatgaaactctttgtgcccgcaatgttaacaatgaagttcacttctttgaaaacaacaattttaacacaattgcaaataaattgcatttgcaaaaaattaatgattttgtattatcacctggaccccaaccatacaaggtggctgtctatgttccaggaagtaaaggtgcaccttcatttgttagattatatcagtaccccaactttgctggacctcatgcagctttagctaataaaagtttctttaaggcagataaagttacaatgctgtggaataaaaaagctactgctgtgttggtaatagctagcacagatgttgacaagacaggagcttcctactatggagaacaaactctacactacattgcaacaaatggagaaagtgctgtagtgcaattaccaaaaaatggccccatttatgatgtagtttggaattctagttctactgagttttgtgctgtatatgggtttatgcctgccaaagcgacaattttcaacttgaaatgtgatcctgtatttgactttggaactggtcctcgtaatgcagcctactatagccctcatggacatatattagtattagctggatttggaaatctgaggggacaaatggaagtgtgggatgtgaaaaactacaaacttatttctaaaccggtggcttctgattctacatattttgcttggtgcccggatggtgagcatattttaacagctacatgtgctcccaggttacgggttaataatggatacaaaatttggcattatactggctctatcttgcacaagtatgatgtgccatcaaatgcagaattatggcaggtttcttggcagccatttttggatggaatatttccagcaaaaacaataacttaccaagcagttccaagtgaagtacccaatgaggaacctaaagttgcaacagcttatagacccccagctttaagaaataaaccaatcaccaattccaaattgcatgaagaggaaccacctcagaatatgaaaccacaatcaggaaacgataagccattatcaaaaacagctcttaaaaatcaaaggaagcatgaagctaagaaagctgcaaagcaggaagcaagaagtgacaagagtccagatttggcacctactcctgccccacagagcacaccacgaaacactgtctctcagtcaatttctggggaccctgagatagacaaaaaaatcaagaacctaaagaagaaactgaaagcaatcgaacaactgaaagaacaagcagcaactggaaaacagctagaaaaaaatcagttggagaaaattcagaaagaaacagcccttctccaggagctggaagatttggaattgggtatttaaagattcacggaaagcaagttgatgaccagaaatcagtgcaaacacatcttctgttaaacccattggtatacacagaatattcctgtgcccacacttaatgtcaatctataattttaaccatttatccaagattctactaagtgtaaaattatttaataatgtctattaaattgatatttatatcttgcatcctatatcatgtcaatatgtgatatagaaaagagatacgtgaattttttagctaagcttgacagattgaaagacaagtgtcatttttttttgtagagggtgatatataccatgtaaatgaataaagacattttaaatttaaaaaaaaaaaaaaaaaa

SEQ ID NO: 312 - protein, 609 aa, Homo sapien
MRRVCRGRVPWMNSHPSGFSFRDNMAPSTPLLTVRGSEGLYMVNGPPHFTESTVFPRESGKNCKVCIFSKDGTLFAWGNGEKVNIISVTNKGLLHSFDLLKAVCLEFSPKNTVLATWQPYSTSKDGTAGIPNLQLYDVKTGTCLKSFIQKKMQNWCPSWSEDETLCARNVNNEVHFFENNNFNTIANKLHLQKINDFVLSPGPQPYKVAVYVPGSKGAPSFVRLYQYPNFAGPHAALANKSFFKADKVTMLWNKKATAVLVIASTDVDKTGASYYGEQTLHYIATNGESAVVQLPKNGPIYDVVWNSSSTEFCAVYGFMPAKATIFNLKCDPVFDFGTGPRNAAYYSPHGHILVLAGFGNLRGQMEVWDVKNYKLISKPVASDSTYFAWCPDGEHILTATCAPRLRVNNGYKIWHYTGSILHKYDVPSNAELWQVSWQPFLDGIFPAKTITYQAVPSEVPNEEPKVATAYRPPALRNKPITNSKLHEEEPPQNMKPQSGNDKPLSKTALKNQRKHEAKKAAKQEARSDKSPDLAPTPAPQSTPRNTVSQSISGDPEIDKKIKNLKKKLKAIEQLKEQAATGKQLEKNQLEKIQKETALLQELEDLELGI

SEQ ID NO: 313 - DNA, 3261 bp, Homo sapien
  unsure 2588-2616, 3038-3065: unknown base
aaaaaaaaaaaagcatatcaaaacaaaattttaactactaatgggaaggttaaaaagctgccacgtatttctagtacaatgtatccaataagagcaaggacattgttaaatggaacaagacagctgggaaaggccccactatctctaatagaattgtgctactataaaacatgaagatatcagcaatttggccacttgcagtttttttcagcatgttaaagcaagtgctaagtactttattagtactttatttagtactttattttaaaggtctagaaaacaacagtcttcctggaggccccagaatccctttcatgggattcataagggactcaggtattcttattttctgccaaaaggtgtgcttatttagggactcttttacgatactttgtttctgaagttaggtagatcttggtttactgtgccaaggtcctacctagcattccctgtaggaatatttgaaattccactagctagtctaagaagtcaaagcacaaaattaattgtcaacgcttctctcatattcttaaaattgaagcagtttgcagggaagaacaagaatgaggtgtccctgccttggtaaagcaactgccaaattttgttctagaaagaatccccaagtgtgtggatctattataatttctttatcttttatgaatgagggcatcttttctacttgagcaagatcatggtccttgaccagtgggcttttccttcatatctgtcttgtgtagttgtgcttttcctttggctcgtttttggtctgtcagggtaaccagcagtgcacaatatgagacaaatgctctttagagagaaatctggtgagactgtagaacccagagcaaaactgtttttttttcagtctctgttttcttttctaaatgctatagaaaataaaggcacctgaaaagaaactactactttaacactgctgtggaaggcctttgctttataagaaaaatattattagctatgggaaagtaatgttctttatgtaaagacttaaaaatagactaatagtttacagagttattatataaaatacgatgtgaatttatttcaaacaagttgtgaaggtaccaaaaaccacaataaaagttaatatatataaaaactactagaacaaaaaagcttgaaggtgtgggggtggagggtatggaagaccaaaagtaaatttaaaaaagaaatttttgaaaggaaacagctttatcaggggaagttaaatataacactccgtttttttcttctttctaataatgatatggatcaacaaatgcaatttgaactttttaagataactctaaatgtgttttgtttcttaaatgcacaattgattcttctatactgtaatgcttctttgctgacgctggaaaatggtcagactgctgactttgtgcctttaaaatgcattctgctttgacagtggcagactttttggtgctggagaagattcactagcagtcttatatgtgcttttcaggaaatatctttctacttaaggccttgagagattcaaagtggcatgacttaggcttggaccaaatataagatcttttacattgcaaacaaaatgttgtattgaataaaagggttaaaaaaatcataatgactagtggaaattttgatgggttgttaattatttaaaatgtatttgaaagtatacagactgaaaatttcagtatgaatatcttgaaaattttcagcacttttccttgtttacaaaacatctttctaacttaaaaaaatgactattgccttagaaagttttaaaaggcacagttacccttacataacatatataaggaattaaaatattaatgcatttgctgaactgtaaaagaaaattttaaaccttgatttcagagtgaattggattggctttcacttgagagagtctttaccttattcccaaagaaactgcattaaaaagatgaaactatttctttagactaagtctctgctactccagctcatatatatgtcagatctgctctgtagtatttctgacatggagttgttataagatatgtgaaatcacttagaaaataaaatcagatgtgaatagtttagcaggatgaccaagccagatgcagactccttggcctatggcaaagttctgtgccagtgattttatttggagtctgggaactgatagcttgataaaatcacctggtgtcaattaaatatacaaatctatcttttttaatagaatgaatcttctttgtttgttcaataattgtaacttattatgtcaggtactaaattaacatccttaaggaggtcacaatctaggaggaacatgggcaaacagttacttattttatggcatacgctaactctgaaagttcagcaatgatgttttaaaatgttattttttattaagggaaaagcaattttaggtaatcattggctgttataaacggaaatgtcactgacaacagggattagagtaaaagtatctccaaactagagggatcccctccccaaccaggtcacatagcatctctctcaggaccccctcttactgcaaaacccagcctctactcaacagttctggtgatggggagcatttattccataacagnnnnnnnnnnnnnnnnnnnnnnnnnnnnnagtgtctcttttaaagaaaacatactttattttggtctaaattgtgaaaatacccaaaacatttgatagaaattgaactctgtcaacagtgttatttatactaagatcaggacagttccttgagatcatactgttttattactaagtttggcctttgttttacaaatgtaatgttcatatttatttgaattttaagattggttaaatgttaatgaaaagcaatccaattgttaatttttagtagtgccttttctctgtatgccttaattttattttatattaataattcaagttacccaccaaaatgaagattttttccaaaatcagtaggcttcacaagttcatttggccttagactgtgtattggtccttaaatgtttcttaatgcctgcctcctcctacccttttctacctcctttttnnnnnnnnnnnnnnnnnnnnnnnnnnnngttaggagagaaacattaggatttgtctgtgatagacatgctgcagcttccactagacatgaattcccaacacaagcatagaaagaggtattctcgttcagaagagacatgtaaatgttttctgggttgaatattcgattttcaatcacattggcactgtccaagttcttggcatattatagttcagttatgccaa

SEQ ID NO: 314 - protein, 57 aa, Homo sapien
KKKKAYQNKILTTNGKVKKLPRISSTMYPIRARTLLNGTRQLGKAPLSLIELCYYKT

SEQ ID NO: 315 - DNA, 696 bp, Homo sapien
atgacggtgggcaagagcagcaagatgctgcagcatattgattacaggatgaggtgcatcctgcaggacggccggatcttcattggcaccttcaaggcttttgacaagcacatgaatttgatcctctgtgactgtgatgagttcagaaagatcaagccaaagaactccaaacaagcagaaagggaagagaagcgagtcctcggtctggtgctgctgcgaggggagaatctggtctcaatgacagtagagggacctcctcccaaagatactggtattgctcgagttccacttgctggagctgccgggggcccagggatcggcagggctgctggcagaggaatcccagctggggttcccatgccccaggctcctgcaggacttgctgggccagtccgtggggttggcgggccatcccaacaggtgatgaccccacaaggaagaggtactgttgcagccgctgcagctgctgccacagccagtattgccggggctccaacccagtacccacctggccgtgggggtcctcccccacctatgggccgaggagcaccccctccaggcatgatgggcccacctcctggtatgagacctcctatgggtcccccaatggggatcccccctggaagagggactccaatgggcatgccccctccgggaatgcggcctcctccccctgggatgcgaggccttctttga

SEQ ID NO: 316 - protein, 231 aa, Homo sapien
MTVGKSSKMLQHIDYRMRCILQDGRIFIGTFKAFDKHMNLILCDCDEFRKIKPKNSKQAEREEKRVLGLVLLRGENLVSMTVEGPPPKDTGIARVPLAGAAGGPGIGRAAGRGIPAGVPMPQAPAGLAGPVRGVGGPSQQVMTPQGRGTVAAAAAAATASIAGAPTQYPPGRGGPPPPMGRGAPPPGMMGPPPGMRPPMGPPMGIPPGRGTPMGMPPPGMRPPPPGMRGLL

SEQ ID NO: 317 - DNA, 1168 bp, Homo sapien
ggcacgaggccgggccgaggcgatggcgccctgggcgctcctcagccctggggtcctggtgcggaccgggcacaccgtgctgacctggggaatcacgctggtgctcttcctgcacgataccgagctgcggcaatgggaggagcagggggagctgctcctgcccctcaccttcctgctcctggtgctgggctccctgctgctctacctcgctgtgtcactcatggaccctggctacgtgaatgtgcagccccagcctcaggaggagctcaaagaggagcagacagccatggttcctccagccatccctcttcggcgctgcagatactgcctggtgctgcagcccctgagggctcggcactgccgtgagtgccgccgttgcgtccgccgctacgaccaccactgcccctggatggagaactgtgtgggagagcgcaaccacccactctttgtggtctacctggcgctgcagctggtggtgcttctgtggggcctgtacctggcatggtcaggcctccggttcttccagccctggggtctgtggttgcggtccagcgggctcctgttcgccaccttcctgctgctgtccctcttctcgttggtggccagcctgctcctcgtctcgcacctctacctggtggccagcaacaccaccacctgggaattcatctcctcacaccgcatcgcctatctccgccagcgccccagcaaccccttcgaccgaggcctgacccgcaacctggcccacttcttctgtggatggccctcagggtcctgggagaccctctgggctgaggaggaggaagagggcagcagcccagctgtttagggttgctggaggccgggctaccgtcttgtgcctgaaaaccacggggcctgtccccagctggggtgagcgctcagagggcctggggccctcactcctgcccacgcctcccagaccccagaacggagcttcaagtcagacagatccctgccttggtgggcagttctgccttccaaggaagaaggggaagaaaaggacctgtgggtggctcaggcccaagcagaccccgggctccaccccagccccgcccaggctgctgccagtgcacacttttacaaatttaatataaagcaagtccagtcttaaaaagacaaaaaaaaaaaaaaaaaaaaaaaaaaaaaaaaa

SEQ ID NO: 318 - protein, 267 aa, Homo sapien
MAPWALLSPGVLVRTGHTVLTWGITLVLFLHDTELRQWEEQGELLLPLTFLLLVLGSLLLYLAVSLMDPGYVNVQPQPQEELKEEQTAMVPPAIPLRRCRYCLVLQPLRARHCRECRRCVRRYDHHCPWMENCVGERNHPLFVVYLALQLVVLLWGLYLAWSGLRFFQPWGLWLRSSGLLFATFLLLSLFSLVASLLLVSHLYLVASNTTTWEFISSHRIAYLRQRPSNPFDRGLTRNLAHFFCGWPSGSWETLWAEEEEEGSSPAV

SEQ ID NO: 319 - DNA, 1367 bp, Homo sapien
gatctcaggctcggctccccgcccgccgcagcccactgttgacccggcccgtactgcggccccgtggccaccatgtccctgcacggcaaacggaaggagatctacaagtatgaagcgccctggacagtctacgcgatgaactggagtgtgcggcccgataagcgctttcgcttggcgctgggcagcttcgtggaggagtacaacaacaaggttcagcttgttggtttagatgaggagagttcagagtttatttgcagaaacacctttgaccacccataccccaccacaaagctcatgtggatccctgacacaaaaggcgtctatccagacctactggcaacaagcggtgactatctccgtgtgtggagggttggtgaaacagagaccaggctggagtgtttgctaaacaataataagaactctgatttctgtgctcccctgacctcctttgactggaatgaggtggatccttatcttttaggtacctcaagcattgatacgacatgcaccatctgggggctggagacagggcaggtgttagggcgagtgaatctcgtgtctggccacgtgaagacccagctgatcgcccatgacaaagaggtctatgatattgcatttagccgggccgggggtggcagggacatgtttgcctctgtgggtgctgatggctcggtgcggatgtttgacctccgccatctagaacacagcaccatcatttacgaagacccacagcatcacccactgcttcgcctctgctggaacaagcaggaccctaactacctggccaccatggccatggatggaatggaggtggtgattctagatgtccgggttccctgcacacctgtcgccaggttaaacaaccatcgagcatgtgtcaatggcattgcttgggccccacattcatcctgccacatctgcactgcagcggatgaccaccaggctctcatctgggacatccagcaaatgccccgagccattgaggaccctatcctggcctacacagctgaaggagagatcaacaatgtgcagtgggcatcaactcagcccgactggatcgccatctgctacaacaactgcctggagatactcagagtgtagtgttggtggcgctgtgcccacgaggcaggggcttttgtatttcctgcctctgccccacccccaaagtaagaagaaacatgtttccagtggccagtatgtctttcattgctttgcacccactgttaccagaagctgctctaggagttcctggccagtcaccccatcgccctctgtggcagactcagtgctgtgtggcgccctcctagcccagggctgagttttaagattttctctcctttcctcttctcctttggttcctcaattaa

SEQ ID NO: 320 - protein, 342 aa, Homo sapien
MSLHGKRKEIYKYEAPWTVYAMNWSVRPDKRFRLALGSFVEEYNNKVQLVGLDEESSEFICRNTFDHPYPTTKLMWIPDTKGVYPDLLATSGDYLRVWRVGETETRLECLLNNNKNSDFCAPLTSFDWNEVDPYLLGTSSIDTTCTIWGLETGQVLGRVNLVSGHVKTQLIAHDKEVYDIAFSRAGGGRDMFASVGADGSVRMFDLRHLEHSTIIYEDPQHHPLLRLCWNKQDPNYLATMAMDGMEVVILDVRVPCTPVARLNNHRACVNGIAWAPHSSCHICTAADDHQALIWDIQQMPRAIEDPILAYTAEGEINNVQWASTQPDWIAICYNNCLEILRV

SEQ ID NO: 321 - DNA, 2505 bp, Homo sapien
tggcagtgatgtcattccttactaggcttccaaagccactgctgtggccacagcttccatggagacaggcaagctgagcctctatgtggcaccaattcctgcagctgtttgtgttggagggaaaaaaatccaaatggacatcaacagctttcatcaactaaataaccacagaaaatatttatgaagactataaagcaatgattacttttgaattggaaaggaatcactattatttgaaatgtttcttcaaaagtgagcatccggacaggaaccatcatggatgctgaggccatggatgaaggcctactcgggaagatgatatccttgcagtctcaaaacggcaccccacaaaggtgatatcctaatttacaaagggaaaaaggtaccttaatctgaaatctggcaaatgcagcctcaacagaagtgacagaattgaacatcgccaataatgggacacacagacatcacatgcccccagtctgatgcaccacggagtcgtctctgatgtattcttgtcaaaaaatgtttgcctgattctaatcatgaaagaacaattagaaaaaatccaaattgacagatattctgcagaataaatggcctgacctcatcaaaaacatcaatgtcatgaaaaacacaaaacattgcagatagcgtgaaattaaagattacagagatataacttaatgcaagatctctgactggatcctagactgcaggaaaaagtctgctataaagaacatttggatcacttgtagtagctgggaaataaaacaaaacattatttgtaaaaggggggaaatctgaacatgggtcttgcagtatttatgacagtttttgcggggcagagatttctagattgacagctgttttagtactttcaaggtgatgctctgtctgctggtttgcattgtttctgtctgagttaagagactggcagaacacagagttgcagtagccaaacactggagaaagctgggccctacagaaacctaacgctgaagaaacctcaggagccaaactggtggagaaaacaaagagtcctccctctctcccttttcaaataatgatcatacatcttcaagctgtctgaaatggttaaggagttcagtctgtcgtcaggcacacaccagagccagctagcccacacagaccccatcagagcaaaacagacaagagaatttaattcatatccacatagaaaggacttctaggtaggaggtagaccctttagctcccttccaattaaaggagtccccaattctggcacctgagagtcccctgggtctaacagctatgatatttatgtagtgtgttgcttacctaaatgaatacaatttccttccagacacgtgacactgatattaaagtgctaatgagagggatctatttcttcttgtacgctaaaagagaaacagtagttcagatttcccatcagaagtccgaggactttgttcttgataactactaccaataaaaattgagtatttgaaaaattcctttgtattttccatccatacacatttttttttaaagcattttaggaagtcctctaattatatagtaaaaattgtcagcaatggcctgctagttttctatttgacctaatcacaaccatcctcgttaggtcctgaggtctgctctgctgcttggccaaaaccaaatggtgccaggtcacaaagcacttgcacatgtgaatcctgcatccattctacaatgggtcactattgactgaaatactttaataaaaatgatagagcacataaagcttgctgttgacagaaacttccgtgctcaagcaaggcagtgctatacatggtgagaccttgcacaaagtcagttaactaacagatgatctagaagcaggtgacacaatgaaataccctttggagctgttgcctatgtctgtggataggctctttgtagctaggttaggcttctgtgttaaagtgtgttagaagaaagcatcacataaggaaaatagaactctattcgtatgttttttcaaaacagaagtcaagtcacattcaggcaaaccaaatctgtaacattcaagaagatgcagtgactcttccgcatcttagagccacggtgtctgaggtggctggcatggctccaacacgctggcttccctgtcagtggatcatttacaatatggtgcatttcaaattactggtgaattcactgaatactggctgtttttttttttttaggggtaatcttatacataaaatttaggaaaagaaagagaaaaaagcaaaaatgacagaaataactcaaaagttcctaaaatttatgtgtatcttttcgtacctgtgaactcctgaataagtatttatatctgacaggtacaaatacaataattatatttttaagtaaaacctatttaataatatgaagtatggtgttaaatacatgtattaaaagataagtaacttcagaagtcttctgactttttaattgtaaaataagtgaaaactgttttgtgcttttttatttactgtatgc

SEQ ID NO: 322 - protein, 24 aa, Homo sapien
AVMSFLTRLPKPLLWPQLPWRQAS

SEQ ID NO: 323 - DNA, 4166 bp, Homo sapien
cggcgcgggtgttgagagcggtgtggtaggtgttgtagccgctatggtgaagttcgctttgtagcggccccggctagagagttggcctgttccctgcctttgtgacccggaggagcttttgggggtgcgtcaagcccctggcctgaggcagcgaactggtttgtggcctgtttgattcctgtcagaggtttgctgacccaagacagtatcgaaaatgcatattaagtcaattattctagagggattcaagtcctatgctcagaggaccgaagtcaatggttttgaccccctcttcaatgctatcactggcttaaatggtagtgggaaatccaacatattggactccatctgctttttactgggcatctccaacctgtctcaggttcgggcttctaatttacaagatttagtttacaaaaatgggcaggctggtattaccaaagcctctgtgtcaatcacttttgataattctgacaaaaagcaaagtcctttaggatttgaggttcatgatgaaatcacagtaacaaggcaggtggttattggtggtagaaataaatatttaatcaatggagtcaatgccaacaacaccagagtacaggatctcttctgttctgttggccttaatgttaacaaccctcactttctcatcatgcagggccgaattacaaaagtattgaatatgaaaccaccagagattttatccatgatagaagaagcagctggaaccaggatgtatgaatacaaaaaaatagctgcacagaaaactatagaaaaaaaggaggctaagctgaaagaaattaagacgatacttgaagaagagattactccaaccattcaaaaattaaaagaggaaagatcgtcctacttggagtaccaaaaagtaatgagagaaatagaacatttgagtcgtttatatattgcttatcagtttttgctggctgaagataccaaagtacgctcagctgaggaattaaaagaaatgcaagataaagttataaagcttcaggaagaattgtctgagaatgataaaaaaataaaagcacttaatcatgaaatagaagaattggaaaaaagaaaagataaggaaactggagttatacttcgatctttagaagatgctcttgcagaggctcagcgagttaatactaaatctcaaagcgcatttgatctcaagaagaaaaatctggcatgtgaggaaagcaaacgcaaagagctggaaaaaaatatggttgaggactcaaaaactttagcagcaaaggaaaaagaggttaaaaagataacagatggactgcatgcccttcaagaagcaagtaataaagatgctgaagctctggcagctgcacagcagcacttcaatgctgtttccgctggcctgtccagtaatgaagatggagcagaagcaactcttgctggtcaaatgatggcctgtaaaaatgatataagtaaagctcagacagaagccaaacaggctcagatgaagttgaagcatgctcaacaggaattaaagaataaacaagctgaagttaagaagatggatagtggctacaggaaggatcaagaagctctagaagctgtaaaaagacttaaagaaaaacttgaagctgaaatgaaaaagctaaattatgaagaaaataaagaggaaagccttttggaaaagcgcaggcagctgtctcgtgatattggtagattgaaagaaacatatgaagctctattagccagatttcccaatcttcgatttgcatacaaggatccagagaagaactggaatagaaattgtgtgaaaggacttgtggcttctctgattagtgtgaaagacacttctgcaaccacagctttagaattagtggctggagaacgactctacaatgttgtagtagacacagaagttactggtaaaaagctactagaaaggggggaactgaaacgtcgatacactataattccactcaataaaatttcagccagatgtattgcaccagaaactctgagagttgctcagaatcttgttggccctgacaacgttcatgtggctctttccttggttgaatataaaccagaacttcagaaagcaatggagtttgtctttggaacaacatttgtttgtgacaatatggataatgccaaaaaagtggcctttgataagaggataatgactagaactgtaactctcggaggtgatgtgtttgatcctcatgggacattgagtggaggtgctcgatcccaggcagcttccattttaaccaagtttcaagaactcaaagatgttcaggatgaactgagaatcaaagagaatgagctgcgggctctagaagaggaattagcaggtcttaaaaacactgctgaaaagtatcgccaactaaaacagcagtgggagatgaaaactgaagaggcagatttattacaaaccaagctccagcaaagctcatatcacaagcaacaagaagaattagatgcccttaaaaaaaccattgaggaaagtgaggagactttgaaaaacactaaagaaatccaaagaaaagcagaagaaaaatatgaagtattggaaaataaaatgaaaaatgcagaagctgaaagagagcgagaactgaaagatgctcagaaaaaactggattgtgccaaaacaaaggcagatgcatctagcaagaagatgaaagaaaaacaacaggaagttgaagctatcactctggaactggaagagctcaagagagagcatacatcttacaaacaacagcttgaagctgtaaatgaagctatcaaatcctatgaaagtcagattgaagtaatggcagctgaggtggctaaaaataaggagtcagtaaataaagctcaagaagaggtgaccaagcaaaaagaggtgataacagcccaagacactgtaattaagctaaatatgcagaagtggcaaaacacaaggagcaaaacaatgattctcagccttaaaattaaggaattagaccaccacatcagcaaacataaacgggaggctgaagatggtgctgcaaaggtatccaaaatgttgaaagattatgactggattaatgcagagagacacctctttggccaacccaatagtgcctatgatttcaaaactaacaaccctaaagaagctggtcagagacttcagaagttgcaagaaatgaaggagaaactaggaagaaatgtcaatatgagagctatgaatgtattgacagaagctgaagagcgatgcaatgacttgatgaagaagaagagaattgtagaaaatgacaaatccaaaattcttacaactatagaagaccttgaccagaagaaaaaccaagccctaaatattgcatggcaaaaggtgaacaaggactttgggtctattttttctactcttttgcctggtgctaatgctatgcttgcaccaccagagggtcaaactgttttggatggtctggagttcaaggttgccttaggaaatacctggaaagaaaacctaactgaacttagtggtggtcagaggtctttagtggccttgtcattaatactgtccatgcttctcttcaaacctgctccaatttatatccttgatgaggtagatgcagccttggatctttctcatacccaaaacattggacagatgctgcgtactcatttcacacattctcagttcattgtggtgtcactaaaagaaggtatgttcaacaatgcaaacgttcttttcaaaaccaagtttgtggatggtgtttctacagtagccagatttactcaatgtcaaaatggaaagatttcaaaggaagcaaaatccaaggcaaaaccacccaaaggagcacatgtggaagtttaaactacaaagttatttcttcatcttgacctgtttttttaaatgtaaacttttaaggacttgagataactaatttgtttatatacaaaaattaatgttactgtgttacttaacccatgttttctctttatataatcacttatcgcttacaaatgagcatatattcctcatctcttaactagtctaattatggtccaattattgtggttgtgattttatgcatatccatcaaaatgttttttttcttatgcgggtcttttatatattagggatcctgagatacccgattctatatgtaaaagctaatatacaaaaaagcagattaaattacatgataaatgtagctgaaaaaaaaaaaaaa

SEQ ID NO: 324 - protein, 1197 aa, Homo sapien
MHIKSIILEGFKSYAQRTEVNGFDPLFNAITGLNGSGKSNILDSICFLLGISNLSQVRASNLQDLVYKNGQAGITKASVSITFDNSDKKQSPLGFEVHDEITVTRQVVIGGRNKYLINGVNANNTRVQDLFCSVGLNVNNPHFLIMQGRITKVLNMKPPEILSMIEEAAGTRMYEYKKIAAQKTIEKKEAKLKEIKTILEEEITPTIQKLKEERSSYLEYQKVMREIEHLSRLYIAYQFLLAEDTKVRSAEELKEMQDKVIKLQEELSENDKKIKALNHEIEELEKRKDKETGVILRSLEDALAEAQRVNTKSQSAFDLKKKNLACEESKRKELEKNMVEDSKTLAAKEKEVKKITDGLHALQEASNKDAEALAAAQQHFNAVSAGLSSNEDGAEATLAGQMMACKNDISKAQTEAKQAQMKLKHAQQELKNKQAEVKKMDSGYRKDQEALEAVKRLKEKLEAEMKKLNYEENKEESLLEKRRQLSRDIGRLKETYEALLARFPNLRFAYKDPEKNWNRNCVKGLVASLISVKDTSATTALELVAGERLYNVVVDTEVTGKKLLERGELKRRYTIIPLNKISARCIAPETLRVAQNLVGPDNVHVALSLVEYKPELQKAMEFVFGTTFVCDNMDNAKKVAFDKRIMTRTVTLGGDVFDPHGTLSGGARSQAASILTKFQELKDVQDELRIKENELRALEEELAGLKNTAEKYRQLKQQWEMKTEEADLLQTKLQQSSYHKQQEELDALKKTIEESEETLKNTKEIQRKAEEKYEVLENKMKNAEAERERELKDAQKKLDCAKTKADASSKKMKEKQQEVEAITLELEELKREHTSYKQQLEAVNEAIKSYESQIEVMAAEVAKNKESVNKAQEEVTKQKEVITAQDTVIKLNMQKWQNTRSKTMILSLKIKELDHHISKHKREAEDGAAKVSKMLKDYDWINAERHLFGQPNSAYDFKTNNPKEAGQRLQKLQEMKEKLGRNVNMRAMNVLTEAEERCNDLMKKKRIVENDKSKILTTIEDLDQKKNQALNIAWQKVNKDFGSIFSTLLPGANAMLAPPEGQTVLDGLEFKVALGNTWKENLTELSGGQRSLVALSLILSMLLFKPAPIYILDEVDAALDLSHTQNIGQMLRTHFTHSQFIVVSLKEGMFNNANVLFKTKFVDGVSTVARFTQCQNGKISKEAKSKAKPPKGAHVEV

SEQ ID NO: 325 - DNA, 2084 bp, Homo sapien
agcaatggcggttcccggcgtggggctcttgacccgtttgaacctgtgtgcccggagaagaactcgagtccagcggcctatcgtcaggcttttgagttgcccaggaactgtggccaaagaccttaggagagacgagcagccttcagggagcgtggagacaggctttgaagacaagattcccaaaaggagattctctgagatgcaaaatgaaagacgagaacaggcacagcggactgttttaatacattgcccagagaaaatcagtgaaaacaagtttcttaaatatttatcccaatttggacctattaataatcatttcttctatgaaagctttggtctctatgctgtcgtagaattttgccaaaaggaaagcataggttcactgcagaatgggactcatactccaagcacggccatggagactgcaattccattcagatcacgtttcttcaatctgaagttgaaaaaccagacttctgaacggtcacgcgtacggtcaagtaatcagttgccacgttcaaacaagcagctttttgaattactttgttatgcagaaagtatagacgatcagctgaacactctcttgaaggagttccagctaacagaggagaacactaagctccgatatctcacctgttctcttattgaagacatggccgccgcgtattttccagactgcatagtcagaccctttggctcctcagtcaacacttttgggaagttaggatgtgatttggacatgtttttggatctagatgaaaccagaaacctcagcgctcacaagatctcaggaaattttctgatggaatttcaagtgaaaaatgttccttcagaaagaattgcaactcagaagatcctgtctgtgttaggagagtgccttgaccactttggccctggctgtgtgggtgtgcaaaaaatattaaatgcccggtgtccgctcgtgaggttctcacaccaggcctccggatttcagtgtgatttgactacgaacaataggattgccttgacaagttccgaactcctttatatatatggtgccctagactcaagagtgagagccttggtgttcagtgtacggtgctgggctcgagcacattcactaacaagtagtattcctggtgcatggattacaaatttctcccttacaatgatggtcatcttttttctccagagaagatcaccccctattcttccaacactagattccttaaaaaccctagcagatgcagaagataaatgtgtaatagaaggcaacaactgcacatttgttcgtgacttgagtagaattaaaccttcacagaacacagaaacattagaattactactgaaggaattttttgagtattttggcaattttgctttcgataaaaattccataaatattcgacagggaagggagcaaaacaaacctgattcttctcctctgtacattcagaatccatttgaaacttctctcaacataagcaaaaatgtaagtcaaagccagctgcaaaaatttgtagatttggcccgagaaagtgcctggattttacaacaggaagatacagatcgaccttccatatcaagtaatcggccctgggggctggtatccctattgctaccatctgctccaaacagaaagtcctttaccaagaagaaaagcaataagtttgcaattgaaacagtcaaaaacttgctagaatctttaaaaggtaacagaacagaaaatttcacaaaaaccagtgggaagagaacaattagtactcagacatgatggctgctacattgtgtaaagaactgggcttagcctatcaaatggtctgtggacttacttggaaaaactgatttgaaactttcacagatctcagctttcatctgatgtcacttttcatgatcttctcattggcccccttaacctggtctgaagttctgggatgttttcagtttgatcagtctgatactcagtggcactttattaaaacatcagctgtggagtgtggcggtgcacacctgtagtcccagctgctcaggaggctgaggcaggaggatctcttgagcccaggattttgaatccatcgtggacaacatagcaagattccatctct

SEQ ID NO: 326 - protein, 582 aa, Homo sapien
MAVPGVGLLTRLNLCARRRTRVQRPIVRLLSCPGTVAKDLRRDEQPSGSVETGFEDKIPKRRFSEMQNERREQAQRTVLIHCPEKISENKFLKYLSQFGPINNHFFYESFGLYAVVEFCQKESIGSLQNGTHTPSTAMETAIPFRSRFFNLKLKNQTSERSRVRSSNQLPRSNKQLFELLCYAESIDDQLNTLLKEFQLTEENTKLRYLTCSLIEDMAAAYFPDCIVRPFGSSVNTFGKLGCDLDMFLDLDETRNLSAHKISGNFLMEFQVKNVPSERIATQKILSVLGECLDHFGPGCVGVQKILNARCPLVRFSHQASGFQCDLTTNNRIALTSSELLYIYGALDSRVRALVFSVRCWARAHSLTSSIPGAWITNFSLTMMVIFFLQRRSPPILPTLDSLKTLADAEDKCVIEGNNCTFVRDLSRIKPSQNTETLELLLKEFFEYFGNFAFDKNSINIRQGREQNKPDSSPLYIQNPFETSLNISKNVSQSQLQKFVDLARESAWILQQEDTDRPSISSNRPWGLVSLLLPSAPNRKSFTKKKSNKFAIETVKNLLESLKGNRTENFTKTSGKRTISTQT

SEQ ID NO: 327 - DNA, 2013 bp, Homo sapien
ttctgcttatcatggttaccaacaaaatgactgctgcctttagaaaccctagtgggaaacaggtggcgacagacaaagttgcagaaaagctgagctctactctctcatgggtgaagaacacagtatcgcatacagtcagtcagatggccagtcaggtggcaagtccatctacttcattacataccacatcctcatctaccacactatcaacaccagccctttcaccatcttccccatcacagttgagtccagacgtcttagaactcctggctaaactggaagaacagaatatattgttagaaacggatagtaagtctttaagatctgtaaatgggtcaagaagaaacagtggctcttctcttgtgtcgagttcatcagcctctagcaacctcagtcaccttgaagaagattcttggattctttggggaagaattgttaatgaatgggaagatgtacgcaaaaagaaggaaaagcaagttaaggaacttgttcataaagggataccccatcactttagagcaatagtttggcaacttttatgcagtgcacaaagtatgccaattaaggatcagtattcagaactcctgaaaatgacctcgccttgtgaaaaattgatccgaagggacattgctagaacttaccctgaacacaacttttttaaggaaaaagatagccttggacaggaggttttatttaatgtaatgaaggcttactctttagtagatcgtgaggttggttactgtcaaggaagtgcttttatagttggattgttgcttatgcagatgccagaagaagaagctttctgtgtatttgttaaattaatgcaagattatagacttcgtgaactttttaaaccaagtatggcagaattgggcctttgtatgtaccagtttgaatgtatgatacaggagcatcttccagagctctttgtacattttcaatctcagagttttcatacctcaatgtatgcatcatcctggtttctgactatctttcttacaacttttccactaccagttgcaacaaggatatttgatatctttatgtctgagggtttagaaatagtgtttcgtgtaggattagcacttcttcagatgaatcaggcagaactgatgcaacttgacatggaagggatgttacagcactttcaaaaggtcattccacatcagtttgatggtgtcccagacaagctaatccaagcagcttaccaagtccaatacaattcaaaaaaaatgaaaaagcttgaaaaggaatacactacaataaaaacgaaagaaatggaagagcaagttgaaattaaaaggttacgcacagaaaatagacttttaaaacagcgcatcgagacattagaaaaacataaatgcagttccaactacaacgaagattttgtgctacagctagagaaggaattggtccaagcccgactgagtgaagctgagtctcagtgtgcattaaaagagatgcaggataaagtcttggatatagagaagaggaataactcccttcctgatgagaataatattgcaaggcttcaggaagaactcattgctgtgaaacttagagaagcagaagccattatgggtttgaaagaacttagacagcaagtcaaggatttagaggaacactggcagcgccacttagctcgtactactgggagatggaaagacccacccaagaaaaatgctatgaatgagttacaggatgaactgatgaccattcgacttagagaagctgaaacacaagcagaaataagagaaataaaacaaaggatgatggaaatggaaacacagttggttgaatccgcagatgtggagcctgcatatatgaagggctgaccgtatactctctgctccttccagagtatctggcatgtgatgagctcgccacaaacatttagtgattcgagtaaggctctggttgatttacagtttctactttcctgacactctgttgctggtttgaataaaaatttcttcctgaaaaaaaaaaaaaaaaaaaaaaaaaaaaaaaaaa

SEQ ID NO: 328 - protein, 607 aa, Homo sapien
MVTNKMTAAFRNPSGKQVATDKVAEKLSSTLSWVKNTVSHTVSQMASQVASPSTSLHTTSSSTTLSTPALSPSSPSQLSPDVLELLAKLEEQNILLETDSKSLRSVNGSRRNSGSSLVSSSSASSNLSHLEEDSWILWGRIVNEWEDVRKKKEKQVKELVHKGIPHHFRAIVWQLLCSAQSMPIKDQYSELLKMTSPCEKLIRRDIARTYPEHNFFKEKDSLGQEVLFNVMKAYSLVDREVGYCQGSAFIVGLLLMQMPEEEAFCVFVKLMQDYRLRELFKPSMAELGLCMYQFECMIQEHLPELFVHFQSQSFHTSMYASSWFLTIFLTTFPLPVATRIFDIFMSEGLEIVFRVGLALLQMNQAELMQLDMEGMLQHFQKVIPHQFDGVPDKLIQAAYQVQYNSKKMKKLEKEYTTIKTKEMEEQVEIKRLRTENRLLKQRIETLEKHKCSSNYNEDFVLQLEKELVQARLSEAESQCALKEMQDKVLDIEKRNNSLPDENNIARLQEELIAVKLREAEAIMGLKELRQQVKDLEEHWQRHLARTTGRWKDPPKKNAMNELQDELMTIRLREAETQAEIREIKQRMMEMETQLVESADVEPAYMKG

SEQ ID NO: 329 - DNA, 1602 bp, Homo sapien
  unsure 657-802: unknown base
tggtgaaaacatgatcttgctatgttgctcaggctggttgtctggcattttctttgtcctttattctttatactagctaaaccctggagtatccttgaagcctttactggcatacagagtacctgaatcttactttggagcctagcatgggtcataaatatatctgattcattaacctgtgagacagctgagagaacacagactccttacctgtatctccaggcatatctggtttttctctgcctaatagattttcctgctttctagttagtaatattgagaaagaagaaaggcttatttatcatttgctttttttccactgtgaatcatctgttctttccatgaacattctggggagcacctcctgattaaactcctgtctccctgaccactatcctgctgtcattggacttcttgaagcacatgggctactgccccaggacactgggatttgagaggagtttagtggtaattgtcaggtctttcaaagcatttattattccttttatacggagatttcagtattgagacttaaaatgaactgaaaaatgagattgaacatttaatattttggatgtaacttttgaagaaagtatgctttggtgcttaaaattgtatatgattttaggtaagaaactttgataatattggcataannnnnnnnnnnnnnnnnnnnnnnnnnnnnnnnnnnnnnnnnnnnnnnnnnnnnnnnnnnnnnnnnnnnnnnnnnnnnnnnnnnnnnnnnnnnnnnnnnnnnnnnnnnnnnnnnnnnnnnnnnnnnnnnnnnnnnnnnnnnnnnnnnctcaaattagcatgatagatcaggctacttagattcagctttctgagatgttatttgttaacattaaggctaatttattataatgaaaatgtaaactttgaggtatgttaatatataaacatctttttcctttggcctaaaaggtctttagtattcagcacactgggtaaagttcagtttagacacaatcaaattggcatcttttaaacataagtgaaatatagagagcttgaacttgagttacttaaagaagatacagtataattaattatacagaacaaaacaaagatgtgtttagagtgactctggcctgactcttgtccatcagcccctagtagcctatcttcagcctttgggaagtcttaacttcccaggttaaactagaatattctggaactgagctgtccaaatttcatcttaaagtggatcatttgactctgaaacacgattctcatggcagaaaaagccctggtgtttccttggagctggggataaaggccagtgagccagcctgtgatgagagctgcccctggcactatctgagtggaaagctcattgggacagccatgcagctatcagagccgactgaagccctgtcccttacccctcaggcacctgatgcttaacttgcctcctgggaaataatgatctagcatttacttggaacaatgattaatcatgttctttaataattgctgacatttgtattttaagctgtataccaatgttcgtatttgacattgattttctaaccattagagatatttaattaaaacttggaaatgaaagaaacaaaatga

SEQ ID NO: 330 - protein, 24 aa, Homo sapien
GENMILLCCSGWLSGIFFVLYSLY

SEQ ID NO: 331 - DNA, 1985 bp, Homo sapien
gggagcagagtcgactgggagcgaccgagcgggccgccgccgccgccatgaaccccgaatatgactacctgtttaagctgcttttgattggcgactcaggcgtgggcaagtcatgcctgctcctgcggtttgctgatgacacgtacacagagagctacatcagcaccatcggggtggacttcaagatccgaaccatcgagctggatggcaaaactatcaaacttcagatctgggacacagcgggccaggaacggttccggaccatcacttccagctactaccggggggctcatggcatcatcgtggtgtatgacgtcactgaccaggaatcctacgccaacgtgaagcagtggctgcaggagattgaccgctatgccagcgagaacgtcaataagctcctggtgggcaacaagagcgacctcaccaccaagaaggtggtggacaacaccacagccaaggagtttgcagactctctgggcatccccttcttggagacgagcgccaagaatgccaccaatgtcgagcaggcgttcatgaccatggctgctgaaatcaaaaagcggatggggcctggagcagcctctgggggcgagcggcccaatctcaagatcgacagcacccctgtaaagccggctggcggtggctgttgctaggaggggcacatggagtgggacaggagggggcaccttctccagatgatgtccctggaggggggaggaggtacctccctctccctctcctggggcatttgagtctgtggctttggggtgtcctgggctccccatctccttctggcccatctgcctgctgccctgagccccggttctgtcagggtccctaagggaggacactcagggcctgtggccaggcagggcggaggcctgctgtgcagttgcctctaggtgactttccaagatgcccccctacacacctttctttggaacgagggctcttctgtcggtgtccctcccacccccatgtatgctgcactgggttctctccttcttcttcctgctgtcctgcccaagaactgagggtctccccggcctctactgccctggctgcagtcagtgcccagggcgaggaatgtggccaggggatccaggacctgggatccagggccctgggctggacctcaggacaggcatggaggccacaggggcccagcagcccaccctttcctctccccactgcctcctctcccttcctacactcccagctcgagccgtccagctgcggtgggatctgagtatatctagggcgggtgggcgggtagcagtgctgggcctgtgtcttgagcctggagggagactgctcctgccgccctctgccctgccggagacagacccatgcgctgcctgcccaccgtgcccctttgtccccatgtcaggcggaggcggaaggcccaccgtgccagaggctgggcaccagccttaaccctcactctgctagcacctcctccctttccccaaggtagcacatctggctcactccccactccgtctctggagcccaccagggaaggccctcatcccctgccgctacttctctggggaatgtgggttccatccaggattgggggcctctctgctcacccactctgcacccaggatcctagtcccctgccctctggcacagctgcttcctgcaagaaagcaagtctttggtctccctgagaagccatgtccctcgtgctgtctcttgcctgtcccacctgtgccctgccctccagcttgtatttaagtccctgggctgcccccttggggtgccccccgctcccaggttcccctctggtgtcatgtcaggcattttgcaaggaaaagccacttggggaaagatggaaaaggacaaaaaaaattaataaatttccattggccctcgggtgagctgagggtttttgcaaggaaaaaaaaaaaaaaaaaaaaaaaaaaaaaaaaaaaaaaaaaaaaaaaaaaaaaaaaaaagaaaaaaaaaaaaaaaaaaaa

SEQ ID NO: 332 - protein, 201 aa, Homo sapien
MNPEYDYLFKLLLIGDSGVGKSCLLLRFADDTYTESYISTIGVDFKIRTIELDGKTIKLQIWDTAGQERFRTITSSYYRGAHGIIVVYDVTDQESYANVKQWLQEIDRYASENVNKLLVGNKSDLTTKKVVDNTTAKEFADSLGIPFLETSAKNATNVEQAFMTMAAEIKKRMGPGAASGGERPNLKIDSTPVKPAGGGCC

SEQ ID NO: 333 - DNA, 1229 bp, Homo sapien
gcgcgacactgaccttcagcgcctcggctcggccatggcgccctccaggaagttcttcgttgggggaaactggaagatgaacgggcggaagcagagtctgggggagctcatcggcactctgaacgcggccaaggtgccggccgacaccgaggtggtttgtgctccccctactgcctatatcgacttcgcccggcagaagctagatcccaagattgctgtggctgcgcagaactgctacaaagtgactaatggggcttttactggggagatcagccctggcatgatcaaagactgcggagccacgtgggtggtcctgggacactcagagagaaggcatgtctttggggagtcagatgagctgattgggcagaaagtggcccatgctctggcagagggactcggagtaatcgcctgcattggggagaagctagatgaaagggaagctggcatcactgagaaggttgttttcgagcagacaaaggtcatcgcagataacgtgaaggactggagcaaggtcgtcctcgcctatgagcctgtgtgggccattggtactggcaagactgcaacaccccaacaggcccaggaagtacacgagaagctccgaggatggctgaagtccaacgtctctgatgcggtggctcagagcacccgtatcatttatggaggctctgtgactggggcaacctgcaaggagctggccagccagcctgatgtggatggcttccttgtgggtggtgcttccctcaagcccgaattcgtggacatcatcaatgccaaacaatgagccccatccatcttccctacccttcctgccaagccagggactaagcagcccagaagcccagtaactgccctttccctgcatatgcttctgatggtgtcatctgctccttcctgtggcctcatccaaactgtatcttcctttactgtttatatcttcaccctgtaatggttgggaccaggccaatcccttctccacttactataatggttggaactaaacgtcaccaaggtggcttctccttggctgagagatggaaggcgtggtgggatttgctcctgggttccctaggccctagtgagggcagaagagaaaccatcctctcccttcttacaccgtgaggccaagatcccctcagaaggcaggagtgctgccctctcccatggtgcccgtgcctctgtgctgtgtatgtgaaccacccatgtgagggaataaacctagcactagg

SEQ ID NO: 334 - protein, 249 aa, Homo sapien
MAPSRKFFVGGNWKMNGRKQSLGELIGTLNAAKVPADTEVVCAPPTAYIDFARQKLDPKIAVAAQNCYKVTNGAFTGEISPGMIKDCGATWVVLGHSERRHVFGESDELIGQKVAHALAEGLGVIACIGEKLDEREAGITEKVVFEQTKVIADNVKDWSKVVLAYEPVWAIGTGKTATPQQAQEVHEKLRGWLKSNVSDAVAQSTRIIYGGSVTGATCKELASQPDVDGFLVGGASLKPEFVDIINAKQ

SEQ ID NO: 335 - DNA, 1393 bp, Homo sapien
gtgcgggaatcacacacatacctcagaatgccgggtctaagttgtagattttatcaacacaaatttcctgaggtggaagatgtagtgatggtgaatgtcagatccattgctgaaatgggggcttatgtcagcttgctggaatacaacaacattgaaggcatgattcttcttagtgaattatccagaaggcgtatccgttctatcaacaaactcatccgaattggcaggaatgagtgtgtggttgtcattagggtggacaaagaaaaaggatatattgatttgtcaaaaagaagagtttctccagaggaagcaatcaaatgtgaagacaaattcacaaaatccaaaactgtttatagcattcttcgtcatgttgctgaggtgttagaatacaccaaggatgagcagctggaaagcctattccagaggactgcctgggtctttgatgacaagtacaagagacctggatatggtgcctatgatgcatttaagcatgcagtctcagacccatctattttggatagtttagatttgaatgaagatgaacgggaagtactcattaataatattaataggcgcttgaccccacaggctgtcaaaattcgagcagatattgaagtggcttgttatggttatgaaggcattgatgctgtaaaagaagccctaagagcaggtttgaattgttctacagaaaacatgcccattaagattaatctaatagctcctcctcggtatgtaatgactacgacaaccctggagagaacagaaggcctttctgtcctcagtcaagctatggctgttatcaaagagaagattgaggaaaagaggggtgtgttcaatgttcaaatggagcccaaagtggtcacagatacagatgagactgaacttgcgaggcagatggagaggcttgaaagagaaaatgccgaagtggatggagatgatgatgcagaagaaatggaagccaaagctgaagattaactttgtgggaaacagagtccaatttaaggaacacagagcagcgcttcctggctgtaaatcctagacttgaaagttttccagtattgaaaacttcaaagctgaatattttttatttctaagtatttaaatgttctaacagatcagaacatgaaatgccctcctaaatgtcagctgttgtcacacagtagctccaacactttgagcatttttaagggagtggcctcatttcactagagacaaatctttaagaatagttctaaaattgggcttgtgatttccatttctgatgtctccagattggcacccctttctagttcaatgcctcacgagatttgccaggggcatccaaggcaaacaatcccaatctttctatataaaatgtattcaagcaaacatcaaataaatttctgggatattt

SEQ ID NO: 336 - protein, 315 aa, Homo sapien
MPGLSCRFYQHKFPEVEDVVMVNVRSIAEMGAYVSLLEYNNIEGMILLSELSRRRIRSINKLIRIGRNECVVVIRVDKEKGYIDLSKRRVSPEEAIKCEDKFTKSKTVYSILRHVAEVLEYTKDEQLESLFQRTAWVFDDKYKRPGYGAYDAFKHAVSDPSILDSLDLNEDEREVLINNINRRLTPQAVKIRADIEVACYGYEGIDAVKEALRAGLNCSTENMPIKINLIAPPRYVMTTTTLERTEGLSVLSQAMAVIKEKIEEKRGVFNVQMEPKVVTDTDETELARQMERLERENAEVDGDDDAEEMEAKAED

SEQ ID NO: 337 - DNA, 2273 bp, Homo sapien
gggggccagttaccatattgtccggagtgggtccttgacattcaggaaagatacatcctcagacctttcaaaatttgtcatgcctctctaacctaaaacagccctcattaaatgcactttaatccgagcactgtatggcttggaaagaattatgagtgaggagaggagcctttccttattggccaaagccgtggatcccagacaccccaatatgatgacagatgtggttaaacttctctctgcggtatgcattgtaggggaagaaagcatccttgaagaagttttagaagctttaacttcagctggtgaagaaaaaaaaattgacagatttttttgtattgtggaaggcctccggcacaattcagttcaactgcaagtagcttgtatgcagctcatcaatgccctggttacatctcctgatgatttggatttcaggcttcacatcagaaatgaatttatgcgttgtggattgaaagagatattgccaaatttaaaatgcattaagaatgatggcctggatatccaacttaaagtctttgatgagcataaagaagaagatttgtttgagttatcccatcgccttgaagatattagagctgaacttgatgaagcatatgatgtttacaacatggtgtggagcacagttaaagaaactagagcagagggatattttatttctattcttcagcatcttttgctgattcgaaatgattattttataaggcaacaatacttcaaattaattgatgagtgtgtatcccagattgtattgcatagagatggaatggatccagacttcacatatcgaaaaagactagatttagatttaacccagtttgtagacatttgcatagatcaagcaaaactagaagagtttgaagagaaagcatcagaactttacaagaaatttgaaaaagagtttaccgaccaccaagaaactcaggctgaattgcagaaaaaagaggcaaagattaatgagcttcaagcagagctacaagcttttaagtctcagtttggtgccttgccagctgattgtaatattcctttgcctccctctaaagaaggtggaactggccactcagcacttcctcctccgcctccactgccttctggtggaggggtgccgcctccacctcctcccccaccacctcctccacttccaggaatgcggatgccattcagtggtcctgtgcctccaccacctcccctgggattccttggaggacaaaattctcctcctctaccaatcctgccatttgggttgaaaccaaagaaagaatttaaacctgaaatcagcatgagaagattgaattggttaaagatcagacctcatgaaatgactgaaaactgtttctggataaaagtaaatgaaaataagtatgaaaacgtggatttgctttgtaaacttgagaatacattttgttgccaacaaaaagagagaagagaagaggaagatattgaagagaagaaatcgattaagaaaaaaattaaagaacttaagtttttagattctaaaattgcccagaacctttcaatcttcctgagctcttttcgggtgccatatgaggaaatcagaatgatgatattggaagtagatgaaacacggttggcagagtctatgattcagaacttaataaagcatcttcctgatcaagagcaattaaattcattgtctcagttcaagagtgaatatagcaacttatgtgaacctgagcagtttgtggttgtgatgagcaatgtgaagagactacggccacggctcagtgctattctctttaagcttcagtttgaagagcaggtgaacaacatcaaacctgacatcatggctgtcagtactgcctgcgaagagataaagaagagcaaaagctttagcaagttgctggaacttgtattgctaatgggaaactacatgaatgctggctcccggaatgctcaaaccttcggatttaaccttagctctctctgtaaactaaaggacacaaaatcagcagatcagaaaacaacgctacttcatttcctggtagaaatatgtgaagagaagtaccctgatatactgaattttgtggatgatttggaacctttagacaaagctagtaaaggtttgtgcctttttaagaaacatttcatggctctgatcttcagtgctaaaagactgaaaattataccttttatttgtatgtactttccactttctcacagtgttttcatacccaatatctcattttaaaaataaagagagttgtaggatattaaaaaaaaaaaaaaaaaaaaag

SEQ ID NO: 338 - protein, 691 aa, Homo sapien
MSEERSLSLLAKAVDPRHPNMMTDVVKLLSAVCIVGEESILEEVLEALTSAGEEKKIDRFFCIVEGLRHNSVQLQVACMQLINALVTSPDDLDFRLHIRNEFMRCGLKEILPNLKCIKNDGLDIQLKVFDEHKEEDLFELSHRLEDIRAELDEAYDVYNMVWSTVKETRAEGYFISILQHLLLIRNDYFIRQQYFKLIDECVSQIVLHRDGMDPDFTYRKRLDLDLTQFVDICIDQAKLEEFEEKASELYKKFEKEFTDHQETQAELQKKEAKINELQAELQAFKSQFGALPADCNIPLPPSKEGGTGHSALPPPPPLPSGGGVPPPPPPPPPPPLPGMRMPFSGPVPPPPPLGFLGGQNSPPLPILPFGLKPKKEFKPEISMRRLNWLKIRPHEMTENCFWIKVNENKYENVDLLCKLENTFCCQQKERREEEDIEEKKSIKKKIKELKFLDSKIAQNLSIFLSSFRVPYEEIRMMILEVDETRLAESMIQNLIKHLPDQEQLNSLSQFKSEYSNLCEPEQFVVVMSNVKRLRPRLSAILFKLQFEEQVNNIKPDIMAVSTACEEIKKSKSFSKLLELVLLMGNYMNAGSRNAQTFGFNLSSLCKLKDTKSADQKTTLLHFLVEICEEKYPDILNFVDDLEPLDKASKGLCLFKKHFMALIFSAKRLKIIPFICMYFPLSHSVFIPNISF

SEQ ID NO: 339 - DNA, 2622 bp, Homo sapien
aagagcaagggatcactgtgctgggtttaaatgcggtatttgacatcttggtgataggcaaattcaatgttctggaaattgtccagaaggtactacataaggacaagtcattagagaatctcggcatgctcaggaacgggggcctcctcttcagaatgaccctgctcacctctggaggggctgggatgctctacgtgcgctggaggatcatgggcacgggcccgccggccttcaccgaggtggacaacccggcctcctttgctgacagcatgctggtgagggccgtaaactacaattactactattcattgaatgcctggctgctgctgtgtccctggtggctgtgttttgattggtcaatgggctgcatccccctcattaagtccatcagcgactggagggtaattgcacttgcagcactctggttctgcctaattggcctgatatgccaagccctgtgctctgaagacggccacaagagaaggatccttactctgggcctgggatttctcgttatcccatttctccccgcgagtaacctgttcttccgagtgggcttcgtggtcgcggagcgtgtcctctacctccccagcgttgggtactgtgtgctgctgacttttggattcggagccctgagcaaacataccaagaaaaagaaacccattgccgctgtcgtgctgggaatcttattcatcaacacgctgagatgtgtgctgcgcagcggcgagtggcggagtgaggaacagcttttcagaagtgctctgtctgtgtgtcccctcaatgctaaggttcactacaacattggcaaaaacctggctgataaaggcaaccagacagctgccatcagaaactaccgggaagctgtaagattaaatcccaagtatgttcatgccatgaataatcttggaaatatcttaaaagaaaggaatgagctacaggaagctgaggagctgctgtctttggctgttcaaatacagccagactttgccgctgcgtggatgaatctaggcatagtgcagaatagcctgaaacggtttgaagcagcagagcaaagttaccggacagcaattaaacacagaaggaaatacccagactgttactacaacctcgggcgtctgtatgcagatctcaatcgccacgtggatgccttgaatgcgtggagaaatgccaccgtgctgaaaccagagcacagcctggcctggaacaacatgattatactcctcgacaatacaggtaatttagcccaagctgaagcagttggaagagaggcactggaattaatacctaatgatcactctctcatgttctcgttggcaaacgtgctggggaaatcccaggaatacaaggaatctgaagctttattcctcaaggcaattaaagcaaatccaaatgctgcaagttaccatggtaatttggctgtgctttatcatcgttggggacatctagacttggccaagaaacactatgaaatctccttgcagcttgaccccacggcatcaggaactaaggagaattacggtctgctgagaagaaagctagaactaatgcaaaagaaagctgtctgatcctgtttccttcatgttttgagtttgagtgtgtgtgcatgaggcatatcattaatagtatgtggttacatttaaccatttaaaagtcttagacatgttattttactgatttttttctatgaaaacaaagacatgcaaaaagattatagcaccagcaatatactcttgaatgcgtgatatgatttttcattgaaattgtattttttcagacaactcaaatgtaattctaaaattccaaaaatgtcttttttaattaaacagaaaaagagaaaaaattatcttgagcaacttttagtagaattgagcttacatttgggatctgagccttgtcgtgtatggactagcactattaaacttcaattatgaccaagaaaggatacactggcccctacaatttgtataaatattgaacatgtctatatattagcatttttatttaatgacaaagcaaattaagtttttttatctcttttttttaaaacaacatactgtgaactttgtaaggaaatatttatttgtatttttatgttttgaatagggcaaataatcgaatgaggaatggaagttttaacatagtatatctatatgcttttccccataggaagaaattgactcttgcagtttttggatgctctgacttgtgcaatttcaatacacaggagattatgtaatgtaatatttttcataagcggttactatcaattgaaagttcaagccatgctttaggcaagagcaggcagcctcacatctttatttttgttacatccaaggtgaagagggcaacacatctgtgtaagctgctttttagtgtgtttatctgaaggccgttttccattttgcttaatgtaactacagacattatccagaaaatgcaaaattttctatcaaatggagccacattcggggaattcgtggtatttttaagaattgagttgttcctgctgttttttatttgatccaaacaatgttttgttttgttcttctctgtatgctgttgacctaatgatttatgcaatctctgtaatttcttatgcagtaaaattactacacaaactag

SEQ ID NO: 340 - protein, 479 aa, Homo sapien
MLRNGGLLFRMTLLTSGGAGMLYVRWRIMGTGPPAFTEVDNPASFADSMLVRAVNYNYYYSLNAWLLLCPWWLCFDWSMGCIPLIKSISDWRVIALAALWFCLIGLICQALCSEDGHKRRILTLGLGFLVIPFLPASNLFFRVGFVVAERVLYLPSVGYCVLLTFGFGALSKHTKKKKPIAAVVLGILFINTLRCVLRSGEWRSEEQLFRSALSVCPLNAKVHYNIGKNLADKGNQTAAIRNYREAVRLNPKYVHAMNNLGNILKERNELQEAEELLSLAVQIQPDFAAAWMNLGIVQNSLKRFEAAEQSYRTAIKHRRKYPDCYYNLGRLYADLNRHVDALNAWRNATVLKPEHSLAWNNMIILLDNTGNLAQAEAVGREALELIPNDHSLMFSLANVLGKSQEYKESEALFLKAIKANPNAASYHGNLAVLYHRWGHLDLAKKHYEISLQLDPTASGTKENYGLLRRKLELMQKKAV

SEQ ID NO: 341 - DNA, 1191 bp, Homo sapien
atgagttggagctttctgactcgcctgctagaggagattcacaaccattccacatttgtggggaagatctggctcactgttctgattgtcttccggatcgtccttacagctgtaggaggagaatccatctattacgatgagcaaagcaaatttgtgtgcaacacagaacagccgggctgtgagaatgtctgttatgatgcgtttgcacctctctcccatgtacgcttctgggtgttccagatcatcctggtggcaactccctctgtgatgtacctgggctatgctatccacaagattgccaaaatggagcacggtgaagcagacaagaaggcagctcggagcaagccctatgcaatgcgctggaaacaacaccgggctctggaagaaacggaggaggacaacgaagaggatcctatgatgtatccagagatggagttagaaagtgataaggaaaataaagagcagagccaacccaaacctaagcatgatggccgacgacggattcgggaagatgggctcatgaaaatctatgtgctgcagttgctggcaaggaccgtgtttgaggtgggttttctgatagggcagtattttctgtatggcttccaagtccacccgttttatgtgtgcagcagacttccttgtcctcataagatagactgctttatttctagacccactgaaaagaccatcttccttctgataatgtatggtgttacaggcctttgcctcttgcttaacatttgggagatgcttcatttagggtttgggaccattcgagactcactaaacagtaaaaggagggaacttgaggatccgggtgcttataattatcctttcacttggaatacaccatctgctccccctggctataacattgctgtcaaaccagatcaaatccagtacaccgaactgtccaatgctaagatcgcctacaagcaaaacaaggccaacacagcccaggaacagcagtatggcagccatgaggagaacctcccagctgacctggaggctctgcagcgggagatcaggatggctcaggaacgcttggatctggcagttcaggcctacagtcaccaaaacaaccctcatggtccccgggagaagaaggccaaagtggggtccaaagctgggtccaacaaaagcactgccagtagcaaatcaggggatgggaagaactctgtctggatttaa

SEQ ID NO: 342 - protein, 396 aa, Homo sapien
MSWSFLTRLLEEIHNHSTFVGKIWLTVLIVFRIVLTAVGGESIYYDEQSKFVCNTEQPGCENVCYDAFAPLSHVRFWVFQIILVATPSVMYLGYAIHKIAKMEHGEADKKAARSKPYAMRWKQHRALEETEEDNEEDPMMYPEMELESDKENKEQSQPKPKHDGRRRIREDGLMKIYVLQLLARTVFEVGFLIGQYFLYGFQVHPFYVCSRLPCPHKIDCFISRPTEKTIFLLIMYGVTGLCLLLNIWEMLHLGFGTIRDSLNSKRRELEDPGAYNYPFTWNTPSAPPGYNIAVKPDQIQYTELSNAKIAYKQNKANTAQEQQYGSHEENLPADLEALQREIRMAQERLDLAVQAYSHQNNPHGPREKKAKVGSKAGSNKSTASSKSGDGKNSVWI

SEQ ID NO: 343 - DNA, 1108 bp, Mus musculus
ctcgagatttaccgggggcctggctgcacgttccctgtcggcgttctgcggcacgggccggtgggacgttggtggggttgcgctgcggggaggaagaggcgactttccaccttctaagcccgcctcgggtcgcgatgtcgtccggggccgggtctcggcggccgcgggagccgccggagcacgagctgcagcggcggcgggagcagaaacggcggcggcacgacgcgcagcagctgcagcagctcaagcacctggagtccttttatgagaaacctcctcctgggtttataaaggaggacgagacgaagccagaagactgtataccagatgtgcccggcaatgaacatgccagggagtttctggctcacgctccgactaaaggactgtggatgcccctggggagagaggtcaaagttatgcaatgttggcgttgcaaacggtatggccatcgaacaggcgacaaagaatgccctttctttatcaaaggcaaccagaagttagaacagttccgagtcgcacatgaagatcctatgtacgacatcattcgcgagaataaaagacatgaaaaggatgtaaggatccagcagttaaagcagttactggaggactccacctcagatgacgacgggagcagctccagctcctcgggggacagagagaagcgcaagaaaaggaagaaaaaagaaaagcacaagaaacgcaagaaggagaagaaaaagaagaagaaacggaagcacaaggcttccaagtccagtgagagctctgactcagagtgacagcaccacccacaggccaaaggacagagccgccgccgagagtgagagactggacatctagcacagccctgggccctcaccgcctcctggtgccaagtgaccactgcagagcaggtgggctcctgcgacacctgtgtcctctaccttatggtcaccgtgtctgtgactgcttcagtaggccgctgcagtgggaggtgatgagaagacactgaaggggcagacactctagggcactgccacggcggcgtttgccctccatggtgtggtaactcattttccatgaacttaaggcttcacccttctttgtggtttgggataaggtaaatctcgag

SEQ ID NO: 344 - protein, 213 aa, Mus musculus
MSSGAGSRRPREPPEHELQRRREQKRRRHDAQQLQQLKHLESFYEKPPPGFIKEDETKPEDCIPDVPGNEHAREFLAHAPTKGLWMPLGREVKVMQCWRCKRYGHRTGDKECPFFIKGNQKLEQFRVAHEDPMYDIIRENKRHEKDVRIQQLKQLLEDSTSDDDGSSSSSSGDREKRKKRKKKEKHKKRKKEKKKKKKRKHKASKSSESSDSE

SEQ ID NO: 345 - DNA, 5487 bp, Homo sapien
atggcctcaggagccggaggagtcggagggggcggtggcggcaagatccggacgcggcgttgccaccaggggccaattaagccttaccagcaggggcgacaacagcatcagggcattcttagcagggttacagaatctgttaagaatattgtgccagggtggttacaaagatacttcaacaagaatgaagatgtatgcagctgttcaacagacacaagcgaggttccacgctggccagaaaataaagaggaccatctggtatatgccgatgaggagagctctaatattactgatgggagaatcacacctgagccagcagtcagtaatacagaagaaccttcaacaactagtactgcttcaaattatccagatgtgttaacaaggccttctcttcatcggagccatctgaatttttccatgttggaatcccctgcattacactgtcagccatctacatcctcggcattcccaattggcagttcgggattttcccttgtaaaggaaattaaagattctacctctcagcatgatgatgataacatctcaactaccagtggtttttcttcaagagcttctgataaagatataactgtttcaaagaacacttcattgccacctctgtggtccccagaagctgaacgttctcactcactctcacagcacactgccaccagctcaaaaaaaccagcattcaacttgtctgcctttggaacactttccccttcacttgggaattcttcaatccttaaaaccagtcagcttggagattctcctttttatcctggaaaaacaacatacggtggggcagcagctgctgtaagacagtctaaactacgaaatacaccttatcaggcaccagttagaagacaaatgaaagctaagcaactcagtgcacaatcttacggtgtgaccagttcaacagctcggcgaatattgcagtctttagagaagatgtcaagccctttagcggatgcaaaaagaattccatccattgtttcttctcctctgaattctcctcttgataggagtgggatagatatcacagattttcaggccaaaagagaaaaggtggattctcaatatcctcctgttcagagacttatgaccccaaagccagtttccatagcaacaaatcgaagtgtttattttaaaccatctctgactccttctggtgaattcaggaagactaatcaaagaatagataacaagtgcagtactggatatgaaaaaaatatgacacccggacaaaatagagaacaacgagaaagtggcttttcatatccaaatttcagtttgcctgcagccaatggtttatcttctggagtaggtggtggaggtggcaagatgagacgagaaagacacgcctttgttgcttctaaacctctggaggaggaggaaatggaagttccagtattaccgaaaatctctctaccgatcaccagttcttcactgcctacctttaattttagttcccctgagatcacaacttcctctccatcacccatcaattcgtctcaagcattaacaaacaaggtacaaatgacctctccgagcagcactggcagtcccatgtttaaattttcatctccaatcgtaaaatctactgaggcaaatgtactacctccatcatctattggatttacatttagtgtgcctgttgcaaaaacagcagaactttctggttctagtagtactttagaaccaattataagtagttcagctcatcatgtcactacagtgaacagtacaaattgtaagaagacaccacctgaagattgtgagggtccttttagacctgcagaaatcctgaaagaaggaagtgttctagatattctgaaaagccctggtttcgcatcgccgaagatagattctgttgctgctcagcccaccgcaacaagcccagtagtttatacaagaccagcaataagtagcttttcttctagtggaattgggtttggggagagtttaaaagctgggtcatcatggcagtgtgatacatgtctactccagaacaaagttacagacaacaaatgcatagcctgtcaagcagcaaaattgtcacccagagatactgctaaacagactggaattgaaacaccaaataaaagtggcaaaacaactctttctgcatcagggacaggctttggagacaaatttaaaccagtgataggcacttgggattgtgatacctgtttagtgcaaaataaacctgaagcaataaaatgtgtagcctgtgaaacaccgaaacctggaacttgtgtgaagcgagcccttacattgacagtggtttcggaaagtgctgagactatgactgcttcatcttccagctgcactgtaaccactggtaccttaggatttggagataaattcaaaaggcccattggatcttgggagtgttcagtatgctgtgtttctaataatgcagaagacaataagtgtgtgtcctgtatgtctgagaaaccaggaagttcagtacctgcttcaagtagcagcactgtacctgtctctctgccttctggaggctctctaggattggaaaagttcaagaaacccgagggaagctgggactgtgaattgtgcctagtgcagaataaggcagactctaccaaatgtttggcatgtgaaagtgcaaagccaggcacaaaatctgggtttaaaggctttgacacatcttcctcatcttcgaactcagcagcctcctcatccttcaaatttggtgtctcatcatcctcttctgggccttctcagactttaacaagcactggaaattttaaatttggagatcagggaggattcaaaataggtgtgtcatctgattctgggtctataaaccccatgagtgaaggctttaaattttctaaaccaataggagattttaaatttggagtttcatctgaatctaagcccgaagaagttaaaaaagatagtaagaatgataattttaagtttggactttcttctggtttaagcaacccagtttctttaactccatttcaatttggggtatctaatcttggacaggaagaaaagaaagaggaactgcccaaatcttcctctgcaggttttagctttggtacaggtgttattaactccacccctgctcctgctaacaccatagtgacctctgagaacaagagcagcttcaaccttggaaccatagaaaccaagagtgcttcagtggctcctttcacatgtaagacatcagaagctaaaaaagaagaaatgcctgccaccaaaggaggattctcttttggcaacgtggagcctgcctctctgccatctgcctcagtgtttgttttgggaaggacagaagagaaacagcaagagcctgtcacttctacttccctagtttttgggaagaaagctgacaatgaagagccaaagtgtcaaccagtgttttcctttgggaattcagagcaaaccaaagatgagaattcttcaaagtccacatttagttttagtatgacaaaaccatctgagaaggaatctgaacagccagcaaaagccacttttgcctttggagctcaaactagtactacagctgatcaaggtgcagcaaagccagtttttagtttcttgaacaacagttcctctagttcaagtacaccagccacttctgctggtggtggcatatttggtagttccacctcttcctccaatccacctgtggctacctttgtgtttggacagtccagcaatcctgtgagcagctctgcctttggtaacactgctgaatccagcacctctcagtctttgctattttctcaagatagcaaactagcaaccacatccagcacaggtacagctgtcaccccatttgtctttggtccaggagccagcagtaataatactaccacctctggtttcggctttggagccacaaccacatctagctctgcaggatcctcctttgtatttggaactggaccctcagcaccatctgccagtccagcatttggtgctaaccagaccccaacatttggacaaagtcaaggtgccagccagcccaatcccccaggctttggatctatatcatcttccacagcattatttcccactggttctcagcctgcaccacctacttttgggacagtgtcaagcagtagccagccccctgtgtttggacagcaacctagtcagtctgcatttggctctggaacaactcctaattctagttcggctttccagtttggcagcagcactacaaatttcaacttcacaaacaacagtccatcaggagtgttcacatttggtgcaaattctagcacacctgcagcctcagcccagccttcaggctcggggggctttccatttaaccagtctccagcagcatttacagtggggtcaaatgggaaaaatgtgttctcttcttctggaacttcattctctggtcgcaagataaagactgctgttagacgcaggaaataaaggtcacattggtgttgtactcaattttaacaacagctggtgccctgctttcagatactggattgtactttgtgctggggttatctgaagtcagatctgcctaaggacttctttaattttggaattttcctcctttctctttcgttacagaagccccaccctgcctcacccacccttttttaaataaataaatagctagactggtgactgattcttcagcaaaaatattttatgatccagcagattattcactgatttgacatagtctggctgtacccaggaatggagcctgcacggtgaatggctttgtatagaacctctttgtctacaccattatgtgcgctgataacgttcatggaacgcgttgaaattgtaattatatctgaggaattctgtatagattagaattctgtatagattagagagtgttgaaacggatgatttctatgctgagtttgtgctggtgtatgtgtgaagtgagtgagttgggtgtattgtgcgctaaacttttctgatagaggaagcctgattaaagaatggtccgtgctaaggacttgttagatctagttcactctccatttaataattatatgctatttctatattttcattctcctatcacctgtcttgcctttttcattattttattatgaaacttgtgtaaatacaattttgtttctgtactttttggcataacataaatctgtgaacttgaaatttgaattttgtgttagagatttttttgttgtttgtttagtcttgtctcagattttattatgtaaatcccattattcaaagttgcctaaatccatttggaaatctttaaaaaaaaaattggggattcttaaagttgaatttattggcttttctgatccagttttgtttggaccaaaaaccagtattgtacaaagtattaagcatatatttttatatttactaaaatggtctgtggtgacttttggataataaggaaaagtttaatattaaagccatgtttattacagtataattaacatgttaaaccatgggataaatgccatcaataaaaaattatgacat

SEQ ID NO: 346 - protein, 1475 aa, Homo sapien [sequence omitted]

SEQ ID NO: 347 - DNA, 1650 bp, Homo sapien
ccttcacacagctctttcaccatgcctggatcacttcctttgaatgcagaagcttgctggccaaaagatgttgggattgttgcccttgagatctattttccttctcaatatgttgatcaagcagagttggaaaaatatgatggtgtagatgctgggaagtataccattggcttgggccaggccaagatgggcttctgcacagatagagaagatattaactctctttgcatgactgtggttcagaatcttatggagagaaataacctttcctatgattgcattgggcggctggaagttggaacagagacaatcatcgacaaatcaaagtctgtgaagactaatttgatgcagctgtttgaagagtctgggaatacagatatagaaggaatcgacacaactaatgcatgctatggaggcacagctgctgtcttcaatgctgttaactggattgagtccagctcttgggatggacggtatgccctggtagttgcaggagatattgctgtatatgccacaggaaatgctagacctacaggtggagttggagcagtagctctgctaattgggccaaatgctcctttaatttttgaacgagggcttcgtgggacacatatgcaacatgcctatgatttttacaagcctgatatgctatctgaatatcctatagtagatgggaaactctccatacagtgctacctcagtgcattagaccgctgctattctgtctactgcaaaaagatccatgcccagtggcagaaagagggaaatgataaagattttaccttgaatgattttggcttcatgatctttcactcaccatattgtaaactggttcagaaatctctagctcggatgttgctgaatgacttccttaatgaccagaatagagataaaaatagtatctatagtggcctggaagcctttggggatgttaaattagaagacacctactttgatagagatgtggagaaggcatttatgaaggctagctctgaactcttcagtcagaaaacaaaggcatctttacttgtatcaaatcaaaatggaaatatgtacacatcttcagtatatggttcccttgcatctgttctagcacagtactcacctcagcaattagcagggaagagaattggagtgttttcttatggttctggtttggctgccactctgtactctcttaaagtcacacaagatgctacaccggggtctgctcttgataaaataacagcaagtttatgtgatcttaaatcaaggcttgattcaagaactggtgtggcaccagatgtcttcgctgaaaacatgaagctcagagaggacacccatcatttggtcaactatattccccagggttcaatagattcactctttgaaggaacgtggtacttagttagggtggatgaaaagcacagaagaacttacgctcggcgtcccactccaaatgatgacactttggatgaaggagtaggacttgtgcattcaaacatagcaactgagcatattccaagccctgccaagaaagtaccaagactccctgccacagcagcagaacctgaagcagctgtcattagtaatggggaacattaagatactctgtgaggtgcaagacttcagggtggggtgggcatggggtgggggtatgggaacagttgg

SEQ ID NO: 348 - protein, 520 aa, Homo sapien
MPGSLPLNAEACWPKDVGIVALEIYFPSQYVDQAELEKYDGVDAGKYTIGLGQAKMGFCTDREDINSLCMTVVQNLMERNNLSYDCIGRLEVGTETIIDKSKSVKTNLMQLFEESGNTDIEGIDTTNACYGGTAAVFNAVNWIESSSWDGRYALVVAGDIAVYATGNARPTGGVGAVALLIGPNAPLIFERGLRGTHMQHAYDFYKPDMLSEYPIVDGKLSIQCYLSALDRCYSVYCKKIHAQWQKEGNDKDFTLNDFGFMIFHSPYCKLVQKSLARMLLNDFLNDQNRDKNSIYSGLEAFGDVKLEDTYFDRDVEKAFMKASSELFSQKTKASLLVSNQNGNMYTSSVYGSLASVLAQYSPQQLAGKRIGVFSYGSGLAATLYSLKVTQDATPGSALDKITASLCDLKSRLDSRTGVAPDVFAENMKLREDTHHLVNYIPQGSIDSLFEGTWYLVRVDEKHRRTYARRPTPNDDTLDEGVGLVHSNIATEHIPSPAKKVPRLPATAAEPEAAVISNGEH

SEQ ID NO: 349 - DNA, 1860 bp, Homo sapien
atggctgctgagaagcaggtcccaggcggcggcggcggcggcggcggcagtggcggcggcggtggacgtggtgccggaggggaagaaaataaagaaaacgaacgcccttcggccggatcgaaggcaaacaaagaatttggggatagcctgagtttggagattcttcagattattaaggaatcccagcagcagcatggtttacggcatggagattttcagaggtacaggggctactgttcccgtagacaaagacgtcttcgaaaaacactcaacttcaagatgggtaacagacacaaattcacagggaagaaagtgactgaagagcttctgaccgataatagatacttgcttctggttctgatggatgctgaaagagcctggagctacgccatgcagctgaaacaggaagccaacactgaaccccgaaaacggtttcacttgttatctcgcctacgcaaagccgtgaagcatgcagaggaattggaacgcttgtgtaagagcaatcgcgtggatgccaagaccaaattagaggctcaggcttacacagcttacctctcaggaatgctacgttttgaacatcaagaatggaaagctgccattgaggcttttaacaaatgcaaaactatctatgagaagctagccagtgctttcacagaggagcaggctgtgctgtataaccaacgtgtggaagagatttcacccaacatccgctattgtgcatataatattggggaccagtcagccatcaatgaactcatgcagatgagattgaggtctgggggcactgagggtctcttggctgaaaaattggaggctttgatcactcagactcgagccaaacaggcagctaccatgagtgaagtggagtggagagggagaacggttccagtgaagattgacaaagtgcgcattttcttattaggactggctgataacgaagcagctattgtccaggctgaaagcgaagaaactaaggagcgcctgtttgaatcaatgctcagcgagtgtcgggacgccatccaggtggttcgggaggagctcaagccagatcagaaacagagagattatatccttgaaggagagccagggaaggtgtctaatcttcaatacttgcatagctacctgacttacatcaagctatcaacggcaatcaagcgtaatgagaacatggccaaaggtctgcagagggctctgctgcagcagcagccagaggatgacagcaagcgctcaccccggccccaggacctgatccgactctatgacatcatcttacagaatctggtggaattgctccagcttcctggtttagaggaagacaaagccttccagaaagagataggcctcaagactctggtgttcaaagcttacaggtgttttttcattgctcagtcctatgtgctggtgaagaagtggagcgaagcccttgtcctgtatgacagagtcctgaaatatgcaaatgaagtaaattctgatgctggcgccttcaagaacagcctaaaggacctgcctgatgtgcaagagctcatcactcaagtgcggtcagagaagtgctccctgcaggccgcagccatccttgagtcaaacgacgctcatcaaacagagacctcctcctcccaagtcaaggacaataagcctctggttgaacggtttgagacattctgcctggacccttcccttgtcaccaagcaagccaaccttgtgcacttcccaccaggcttccagcccattccctgcaagcctttgttctttgacctggccctcaaccatgtggctttcccaccccttgaggacaagttggaacagaagaccaagagtggcctcactggatacatcaagggcatctttggattcaggagctaa

SEQ ID NO: 350 - protein, 619 aa, Homo sapien
MAAEKQVPGGGGGGGGSGGGGGRGAGGEENKENERPSAGSKANKEFGDSLSLEILQIIKESQQQHGLRHGDFQRYRGYCSRRQRRLRKTLNFKMGNRHKFTGKKVTEELLTDNRYLLLVLMDAERAWSYAMQLKQEANTEPRKRFHLLSRLRKAVKHAEELERLCKSNRVDAKTKLEAQAYTAYLSGMLRFEHQEWKAAIEAFNKCKTIYEKLASAFTEEQAVLYNQRVEEISPNIRYCAYNIGDQSAINELMQMRLRSGGTEGLLAEKLEALITQTRAKQAATMSEVEWRGRTVPVKIDKVRIFLLGLADNEAAIVQAESEETKERLFESMLSECRDAIQVVREELKPDQKQRDYILEGEPGKVSNLQYLHSYLTYIKLSTAIKRNENMAKGLQRALLQQQPEDDSKRSPRPQDLIRLYDIILQNLVELLQLPGLEEDKAFQKEIGLKTLVFKAYRCFFIAQSYVLVKKWSEALVLYDRVLKYANEVNSDAGAFKNSLKDLPDVQELITQVRSEKCSLQAAAILESNDAHQTETSSSQVKDNKPLVERFETFCLDPSLVTKQANLVHFPPGFQPIPCKPLFFDLALNHVAFPPLEDKLEQKTKSGLTGYIKGIFGFRS

SEQ ID NO: 351 - DNA, 692 bp, Homo sapien
cctagtacaccgcaatcatgtctattatgtcctataacggaggggccgtcatggccatgaaggggaagaactgtgtggccatcgctgcagacaggcgcttcgggatccaggcccagttggtgaccacggacttccagaagatctttcccatgggtgaccggctgtacatcggtctggccgggctcgccactgacgtccagacagttgcccagcgcctcaagttccggctgaacctgtatgagttgaaggaaggtcggcagatcaaaccttataccctcatgagcatggtggccaacctcttgtatgagaaacggtttggcccttactacactgagccagtcattgccgggttggacccgaagacctttaagcccttcatttgctctctagacctcatcggctgccccatggtgactgatgactttgtggtcagtggcacctgcgccgaacaaatgtacggaatgtgtgagtccctctgggagcccaacatggatccggatcacctgtttgaaaccatctcccaagccatgctgaatgctgtggaccgggatgcagtgtcaggcatgggagtcattgtccacatcatcgagaaggacaaaatcaccaccaggacactgaaggcccgaatggactaaccctgttcccagagcccacttttttttctttttttgaaataaaatagcctgtctttc

SEQ ID NO: 352 - protein, 205 aa, Homo sapien
MSIMSYNGGAVMAMKGKNCVAIAADRRFGIQAQLVTTDFQKIFPMGDRLYIGLAGLATDVQTVAQRLKFRLNLYELKEGRQIKPYTLMSMVANLLYEKRFGPYYTEPVIAGLDPKTFKPFICSLDLIGCPMVTDDFVVSGTCAEQMYGMCESLWEPNMDPDHLFETISQAMLNAVDRDAVSGMGVIVHIIEKDKITTRTLKARMD

SEQ ID NO: 353 - DNA, 734 bp, Homo sapien
gaaagtcagtgagcaaatcgcggaccaccggggctgccagctcgcctgactcccggcctcttgcgctcctaggggcggagaagggtgcgggctcttcgccctttgtgtcctccttctttcactaacttctggactttccagctcttccgaagttcgttcttgcgcaaagcccaaaggctggaaaaccgtccacgatgaccagcatgactcagtctctgcgggaggtgataaaggccatgaccaaggctcgcaattttgagagagttttgggaaagattactcttgtctctgctgctcctgggaaagtgatttgtgaaatgaaagtagaagaagagcataccaatgcaataggcactctccacggcggtttgacagccacgttagtagataacatatcaacaatggctctgctatgcacggaaaggggagcacccggagtcagtgtcgatatgaacataacgtacatgtcacctgcaaaattaggagaagatatagtgattacagcacatgttctgaagcaaggaaaaacacttgcatttacctctgtggatctgaccaacaaggccacaggaaaattaatagcacaaggaagacacacaaaacacctgggaaactgagagaacagcagaatgacctaaagaaacccaacaatgaatatcaagtatagatttgactcaaacaattgtaatttttgaaataaactagcaaaaccagaaaaaaaaaaaaaaaaaaaa

SEQ ID NO: 354 - protein, 140 aa, Homo sapien
MTSMTQSLREVIKAMTKARNFERVLGKITLVSAAPGKVICEMKVEEEHTNAIGTLHGGLTATLVDNISTMALLCTERGAPGVSVDMNITYMSPAKLGEDIVITAHVLKQGKTLAFTSVDLTNKATGKLIAQGRHTKHLGN

SEQ ID NO: 355 - DNA, 5247 bp, Homo sapien
ttccggcgggggaggcgccgggaagtcgatggcgccggcggctcctgcaggaggccactgtctgcagctcccgtgaagatgtccactccagacccacccctgggcggaactcctcggccaggtccttccccgggccctggcccttcccctggagccatgctgggccctagcccgggtccctcgccgggctccgcccacagcatgatggggcccagcccagggccgccctcagcaggacaccccatccccacccaggggcctggagggtaccctcaggacaacatgcaccagatgcacaagcccatggagtccatgcatgagaagggcatgtcggacgacccgcgctacaaccagatgaaaggaatggggatgcggtcagggggccatgctgggatggggcccccgcccagccccatggaccagcactcccaaggttacccctcgcccctgggtggctctgagcatgcctctagtccagttccagccagtggcccgtcttcggggccccagatgtcttccgggccaggaggtgccccgctggatggtgctgacccccaggccttggggcagcagaaccggggcccaaccccatttaaccagaaccagctgcaccagctcagagctcagatcatggcctacaagatgctggccagggggcagcccctccccgaccacctgcagatggcggtgcagggcaagcggccgatgcccgggatgcagcagcagatgccaacgctacctccaccctcggtgtccgcaacaggacccggccctggccctggccctggccccggcccgggtcccggcccggcacctccaaattacagcaggcctcatggtatgggagggcccaacatgcctcccccaggaccctcgggcgtgccccccgggatgccaggccagcctcctggagggcctcccaagccctggcctgaaggacccatggcgaatgctgctgcccccacgagcacccctcagaagctgattcccccgcagccaacgggccgcccttcccccgcgccccctgccgtcccacccgccgcctcgcccgtgatgccaccgcagacccagtcccccgggcagccggcccagcccgcgcccatggtgccactgcaccagaagcagagccgcatcacccccatccagaagccgcggggcctcgaccctgtggagatcctgcaggagcgcgagtacaggctgcaggctcgcatcgcacaccgaattcaggaacttgaaaaccttcccgggtccctggccggggatttgcgaaccaaagcgaccattgagctcaaggccctcaggctgctgaacttccagaggcagctgcgccaggaggtggtggtgtgcatgcggagggacacagcgctggagacagccctcaatgctaaggcctacaagcgcagcaagcgccagtccctgcgcgaggcccgcatcactgagaagctggagaagcagcagaagatcgagcaggagcgcaagcgccggcagaagcaccaggaatacctcaatagcattctccagcatgccaaggatttcaaggaatatcacagatccgtcacaggcaaaatccagaagctgaccaaggcagtggccacgtaccatgccaacacggagcgggagcagaagaaagagaacgagcggatcgagaaggagcgcatgcggaggctcatggctgaagatgaggaggggtaccgcaagctcatcgaccagaagaaggacaagcgcctggcctacctcttgcagcagacagacgagtacgtggctaacctcacggagctggtgccgcagcacaaggctgcccaggtcgccaaggagaaaaagaagaaaaagaaaaagaagaaggcagaaaatgcagaaggacagacgcctgccattgggccggatggcgagcctctagacgagaccagccagatgagcgacctcccggtgaaggtgatccacgtggagagtgggaagatcctcacaggcacagatgcccccaaagccgggcagctggaggcctggctcgagatgaacccggggtatgaagtagctccgaggtctgatagtgaagaaagtggctcagaagaagaggaagaggaggaggaggaagagcagccgcaggcagcacagcctcccaccctgcccgtggaggagaagaagaagattccagatccagacagcgatgacgtctctgaggtggacgcgcggcacatcattgagaatgccaagcaagatgtcgatgatgaatatggcgtgtcccaggcccttgcacgtggcctgcagtcctactatgccgtggcccatgctgtcactgagagagtggacaagcagtcagcgcttatggtcaatggtgtcctcaaacagtaccagatcaaaggtttggagtggctggtgtccctgtacaacaacaacctgaacggcatcctggccgacgagatgggcctggggaagaccatccagaccatcgcgctcatcacgtacctcatggagcacaaacgcatcaatgggcccttcctcatcatcgtgcctctctcaacgctgtccaactgggcgtacgagtttgacaagtgggccccctccgtggtgaaggtgtcttacaagggatccccagcagcaagacgggcctttgtcccccagctccggagtgggaagttcaacgtcttgctgacgacgtacgagtacatcatcaaagacaagcacatcctcgccaagatccgttggaagtacatgattgtggacgaaggtcaccgcatgaagaaccaccactgcaagctgacgcaggtgctcaacacgcactatgtggcaccccgccgcctgctgctgacgggcacaccgctgcagaacaagcttcccgagctctgggcgctgctcaacttcctgctgcccaccatcttcaagagctgcagcaccttcgagcagtggtttaacgcaccctttgccatgaccggggaaaaggtggacctgaatgaggaggaaaccattctcatcatccggcgtctccacaaagtgctgcggcccttcttgctccgacgactcaagaaggaagtcgaggcccagttgcccgaaaaggtggagtacgtcatcaagtgcgacatgtctgcgctgcagcgagtgctctaccgccacatgcaggccaagggcgtgctgctgactgatggctccgagaaggacaagaagggcaaaggcggcaccaagaccctgatgaacaccatcatgcagctgcggaagatctgcaaccacccctacatgttccagcacatcgaggagtccttttccgagcacttggggttcactggcggcattgtccaagggctggacctgtaccgagcctcgggtaaatttgagcttcttgatagaattcttcccaaactccgagcaaccaaccacaaagtgctgctgttctgccaaatgacctccctcatgaccatcatggaagattactttgcgtatcgcggctttaaatacctcaggcttgatggaaccacgaaggcggaggaccggggcatgctgctgaaaaccttcaacgagcccggctctgagtacttcatcttcctgctcagcacccgggctggggggctcggcctgaacctccagtcggcagacactgtgatcatttttgacagcgactggaatcctcaccaggacctgcaagcgcaggaccgagcccaccgcatcgggcagcagaacgaggtgcgtgtgctccgcctctgcaccgtcaacagcgtggaggagaagatcctagctgcagccaagtacaagctcaacgtggaccagaaggtgatccaggccggcatgttcgaccagaagtcctccagccatgagcggcgcgccttcctgcaggccatcctggagcacgaggagcaggatgagagcagacactgcagcacgggcagcggcagtgccagcttcgcccacactgcccctccgccagcgggcgtcaaccccgacttggaggagccacctctaaaggaggaagacgaggtgcccgacgacgagaccgtcaaccagatgatcgcccggcacgaggaggagtttgatctgttcatgcgcatggacctggaccgcaggcgcgaggaggcccgcaaccccaagcggaagccgcgcctcatggaggaggacgagctcccctcgtggatcatcaaggacgacgcggaggtggagcggctgacctgtgaggaggaggaggagaagatgttcggccgtggctcccgccaccgcaaggaggtggactacagcgactcactgacggagaagcagtggctcaaggccatcgaggagggcacgctggaggagatcgaagaggaggtccggcagaagaaatcatcacggaagcgcaagcgagacagcgacgccggctcctccaccccgaccaccagcacccgcagccgcgacaaggacgacgagagcaagaagcagaagaagcgcgggcggccgcctgccgagaaactctcccctaacccacccaacctcaccaagaagatgaagaagattgtggatgccgtgatcaagtacaaggacagcagcagtggacgtcagctcagcgaggtcttcatccagctgccctcgcgaaaggagctgcccgagtactacgagctcatccgcaagcccgtggacttcaagaagataaaggagcgcattcgcaaccacaagtaccgcagcctcaacgacctagagaaggacgtcatgctcctgtgccagaacgcacagaccttcaacctggagggctccctgatctatgaagactccatcgtcttgcagtcggtcttcaccagcgtgcggcagaaaatcgagaaggaggatgacagtgaaggcgaggagagtgaggaggaggaagagggcgaggaggaaggctccgaatccgaatctcggtccgtcaaagtgaagatcaagcttggccggaaggagaaggcacaggaccggctgaagggcggccggcggcggccgagccgagggtcccgagccaagccggtcgtgagtgacgatgacagtgaggaggaacaagaggaggaccgctcaggaagtggcagcgaagaagactgagccccgacattccagtctcgaccccgagcccctcgttccagagctgagatggcataggccttagcagtaacgggtagcagcagatgtagtttcagacttggagtaaaactgtataaacaaaagaatcttccatatttatacagcagagaagctgtaggactgtttgtgactggccctgtcctggcatcagtagcatctgtaacagcattaactgtcttaaagaga

SEQ ID NO: 356 - protein, 1647 aa, Homo sapien
MSTPDPPLGGTPRPGPSPGPGPSPGAMLGPSPGPSPGSAHSMMGPSPGPPSAGHPIPTQGPGGYPQDNMHQMHKPMESMHEKGMSDDPRYNQMKGMGMRSGGHAGMGPPPSPMDQHSQGYPSPLGGSEHASSPVPASGPSSGPQMSSGPGGAPLDGADPQALGQQNRGPTPFNQNQLHQLRAQIMAYKMLARGQPLPDHLQMAVQGKRPMPGMQQQMPTLPPPSVSATGPGPGPGPGPGPGPGPAPPNYSRPHGMGGPNMPPPGPSGVPPGMPGQPPGGPPKPWPEGPMANAAAPTSTPQKLIPPQPTGRPSPAPPAVPPAASPVMPPQTQSPGQPAQPAPMVPLHQKQSRITPIQKPRGLDPVEILQEREYRLQARIAHRIQELENLPGSLAGDLRTKATIELKALRLLNFQRQLRQEVVVCMRRDTALETALNAKAYKRSKRQSLREARITEKLEKQQKIEQERKRRQKHQEYLNSILQHAKDFKEYHRSVTGKIQKLTKAVATYHANTEREQKKENERIEKERMRRLMAEDEEGYRKLIDQKKDKRLAYLLQQTDEYVANLTELVPQHKAAQVAKEKKKKKKKKKAENAEGQTPAIGPDGEPLDETSQMSDLPVKVIHVESGKILTGTDAPKAGQLEAWLEMNPGYEVAPRSDSEESGSEEEEEEEEEEQPQAAQPPTLPVEEKKKIPDPDSDDVSEVDARHIIENAKQDVDDEYGVSQALARGLQSYYAVAHAVTERVDKQSALMVNGVLKQYQIKGLEWLVSLYNNNLNGILADEMGLGKTIQTIALITYLMEHKRINGPFLIIVPLSTLSNWAYEFDKWAPSVVKVSYKGSPAARRAFVPQLRSGKFNVLLTTYEYIIKDKHILAKIRWKYMIVDEGHRMKNHHCKLTQVLNTHYVAPRRLLLTGTPLQNKLPELWALLNFLLPTIFKSCSTFEQWFNAPFAMTGEKVDLNEEETILIIRRLHKVLRPFLLRRLKKEVEAQLPEKVEYVIKCDMSALQRVLYRHMQAKGVLLTDGSEKDKKGKGGTKTLMNTIMQLRKICNHPYMFQHIEESFSEHLGFTGGIVQGLDLYRASGKFELLDRILPKLRATNHKVLLFCQMTSLMTIMEDYFAYRGFKYLRLDGTTKAEDRGMLLKTFNEPGSEYFIFLLSTRAGGLGLNLQSADTVIIFDSDWNPHQDLQAQDRAHRIGQQNEVRVLRLCTVNSVEEKILAAAKYKLNVDQKVIQAGMFDQKSSSHERRAFLQAILEHEEQDESRHCSTGSGSASFAHTAPPPAGVNPDLEEPPLKEEDEVPDDETVNQMIARHEEEFDLFMRMDLDRRREEARNPKRKPRLMEEDELPSWIIKDDAEVERLTCEEEEEKMFGRGSRHRKEVDYSDSLTEKQWLKAIEEGTLEEIEEEVRQKKSSRKRKRDSDAGSSTPTTSTRSRDKDDESKKQKKRGRPPAEKLSPNPPNLTKKMKKIVDAVIKYKDSSSGRQLSEVFIQLPSRKELPEYYELIRKPVDFKKIKERIRNHKYRSLNDLEKDVMLLCQNAQTFNLEGSLIYEDSIVLQSVFTSVRQKIEKEDDSEGEESEEEEEGEEEGSESESRSVKVKIKLGRKEKAQDRLKGGRRRPSRGSRAKPVVSDDDSEEEQEEDRSGSGSEED

SEQ ID NO: 357 - DNA, 1839 bp, Homo sapien
agcaacggggtgcggcagggtggggaacgcgggagcggggccagctcccaggaaagctggtctgcgagcggcccctgcccggctcccaggtccctgcgcgaccccgcccttcccgagaccccagccgggctgccgcccgcgtcccggaagctccagcctgaaccatgtttttcacttgtggcccaaatgaggccatggtggtctccgggttctgccgaagccccccagtcatggtggctggagggcgtgtctttgtcctgccctgcatccaacagatccagaggatctctctcaacacactgaccctcaatgtcaagagtgaaaaggtttacactcgccatggggtccccatctcagtcactggcattgcccaggtaaaaatccaggggcagaacaaggagatgttggcggccgcctgtcagatgttcctggggaagacggaggctgagattgcccacattgccctggagacgttagagggccaccagagggccatcatggcccacatgactgtggaggagatctataaggacaggcagaaattctcagaacaggttttcaaagtggcctcctcagacctggtcaacatgggcatcagtgtggttagctacactctgaaggacattcacgatgaccaggactatttgcactctttggggaaggctcgaacagctcaagtccaaaaagatgcacggattggagaagcagaggccaagagagatgctgggatccgggaagctaaagccaagcaggaaaaggtgtctgctcagtacctgagtgagatcgagatggccaaggcacagagagattacgaactgaagaaggccgcctatgacatcgaggtcaacacccgccgagcacaggctgacctggcctatcagcttcaggtggccaagactaagcagcagattgaggagcagcgggtgcaggtgcaggtggtggagcgggcccagcaggtggcagtgcaggagcaggagatcgcccggcgggagaaggagctggaggcccgggtgcggaagccagcggaagcggagcgctacaagctggagcgcctagccgaggcagagaagtcccaactaattatgcaggcggaggcagaagccgcgtctgtgcggatgcgtggggaagctgaggcctttgccataggggcccgagcccgagccgaggctgagcagatggccaagaaggcagaagccttccagctgtaccaagaggctgctcagctggacatgctgctagagaagctgccccaggtggcagaggagatcagtggtcccttgacttcagccaataagatcacactggtgtccagcggcagtgggaccatgggggcagccaaagtgactggggaagtactggacattctaactcgcctgccagagagtgtggaaagactcacaggcgtgagcatctcccaggtgaatcacaagcctttgagaacagcctgagccttcagccctcacagatgcccagcctcatagctgaagttgcctgaatgatcctcctgttgcatgtaacccactggcctccctgagcatgtccattgacagtgaggtcccacccctcatctctccttgccaaatagtttgtgccttgtcttgaagggggttgctccccttgccaacctcacactgctatgattgccaactccagcggtcccatgtcagccttctgatgatcccactccaccccacctcaacttatttaacttcctaattaaatcagactgtttgagcctgttgtctagaatattttcctgaccaagactgagggatgggctggaggttttcaactttgctacccaaataaattgctgtaagtaagtactaaaaaaaaaaa

SEQ ID NO: 358 - protein, 427 aa, Homo sapien
MFFTCGPNEAMVVSGFCRSPPVMVAGGRVFVLPCIQQIQRISLNTLTLNVKSEKVYTRHGVPISVTGIAQVKIQGQNKEMLAAACQMFLGKTEAEIAHIALETLEGHQRAIMAHMTVEEIYKDRQKFSEQVFKVASSDLVNMGISVVSYTLKDIHDDQDYLHSLGKARTAQVQKDARIGEAEAKRDAGIREAKAKQEKVSAQYLSEIEMAKAQRDYELKKAAYDIEVNTRRAQADLAYQLQVAKTKQQIEEQRVQVQVVERAQQVAVQEQEIARREKELEARVRKPAEAERYKLERLAEAEKSQLIMQAEAEAASVRMRGEAEAFAIGARARAEAEQMAKKAEAFQLYQEAAQLDMLLEKLPQVAEEISGPLTSANKITLVSSGSGTMGAAKVTGEVLDILTRLPESVERLTGVSISQVNHKPLRTA

SEQ ID NO: 359 - DNA, 1574 bp, Homo sapien
gacagcctccgccacatcctccacctctcttggtccagcgagcgttgccgggccagggtcaagcggagggctccgacggcgcggacggagcgaagcgccgagccatggcgcaccaaacgggcatccacgccacggaagagctgaaggaattctttgccaaggcacgggctggctctgtgcggctcatcaaggttgtgattgaggacgagcagctcgtgctgggtgcctcgcaggagccagtaggccgctgggatcaggactatgacagggccgtgctgccactgctggacgcccagcagccctgctacctgctctaccgcctcgactcacagaatgctcagggcttcgaatggctcttcctcgcctggtcgcctgataactcccccgtgcggctgaagatgctgtacgcggccacgcgggccacagtgaaaaaggagtttggaggtggccacatcaaggatgagctcttcgggactgtgaaggatgacctctcttttgctgggtaccagaaacacctgtcgtcctgtgcggcacctgccccgctgacctcggctgagagagagctccagcagatccgcattaacgaggtgaagacagagatcagtgtggaaagcaagcaccagaccctgcagggcctcgccttccccctgcagcctgaggcccagcgggcactccagcagctcaagcagaaaatggtcaactacatccagatgaagctggacctagagcgggaaaccattgagctggtgcacacagagcccacggatgtggcccagctgccctcccgggtgccccgagatgctgcccgctaccacttcttcctctacaagcacacccatgagggcgacccccttgagtctgtagtgttcatctactccatgccggggtacaagtgcagcatcaaggagcgaatgctctactccagctgcaagagccgcctcctcgactccgtggagcaggacttccatctggagatcgccaagaaaattgagattggcgatggggcagagctgacggcagagttcctctacgacgaggtgcaccccaagcaacacgccttcaagcaggccttcgccaagcccaagggcccagggggcaagcggggccataagcgcctcatccgcggcccgggtgaaaatggggatgacagctaggaggctggagcagggccggccacgtgtggactgtggggctgcccaccttccgctccctgccaccatcctccttcctgggctccaggaaagtgtttctgggaggtcaggagggctggcagctgaacgcacttgcagcgtccgagggccaccgggctggcattttgtgacccttccctgttgctgtccctgcatctcgtctgtgtgcccagggtgtccggggaccctgcctggctggcttaagggggctgggtcaggggcctggcatgaacctggcctcccggggagctgagactagggtcccagcacagcccagaaacctttggccacaagaagtggggtcagtcagggctggggcaggggtcactgcagtttgggatggttgaatgctgtattttctaaagaataaaatatttttaaatc

SEQ ID NO: 360 - protein, 349 aa, Homo sapien
MAHQTGIHATEELKEFFAKARAGSVRLIKVVIEDEQLVLGASQEPVGRWDQDYDRAVLPLLDAQQPCYLLYRLDSQNAQGFEWLFLAWSPDNSPVRLKMLYAATRATVKKEFGGGHIKDELFGTVKDDLSFAGYQKHLSSCAAPAPLTSAERELQQIRINEVKTEISVESKHQTLQGLAFPLQPEAQRALQQLKQKMVNYIQMKLDLERETIELVHTEPTDVAQLPSRVPRDAARYHFFLYKHTHEGDPLESVVFIYSMPGYKCSIKERMLYSSCKSRLLDSVEQDFHLEIAKKIEIGDGAELTAEFLYDEVHPKQHAFKQAFAKPKGPGGKRGHKRLIRGPGENGDDS

SEQ ID NO: 361 - DNA, 689 bp, Homo sapien
ggaatttggaagccctcaaatcccattcctaatctgatgagtctatggaccaatttgtggaggacagtatattaaatagatctgatttttgccatcaatgtaaggaggataaaaacttgcataccaattgtacacccttgcaaaatctttctctgatgttggagaaaatgggccagtgagatcatggatatagaagtacagtcaatgttcagctgtaccctcccacaatcccacttccttcctcaacacaattcaaacaaatagactcagactgtttcaggctccaggacaggaagtgcagtgtaggcaaaattgcaaaaattgagggcacaggggtggagatgggggggttgaataacaagctgtgctaaataattacgtgtaaatatattttttcatttttaaaaattgatttcttttgcacattccatgacaatatatgtcacatttttaaaataaatgcaaagaagcatacatccaagccactgagctcatttgtcttctgttttgataaagtggtaaagaaggaactaacatgggaatgcattgctacaatttaaataagcataccaagataaattcatttatggtgctttgagtatatgagaccctcttctaccagacagatgatcagtgttagatttatagagaagggattatcaaattcccatggccaagaaggtcagaga

SEQ ID NO: 362 - protein, 28 aa, Homo sapien
MRPSSTRQMISVRFIEKGLSNSHGQEGQ

SEQ ID NO: 363 - DNA, 1155 bp, Homo sapien
gggggaatacttccaagttgtagtgttgttgttttcagcctgctgctgctgctgctgttgcggctaggggaaccgtcgtggggaaggatggtgtgcgaaaaatgtgaaaagaaacttggtactgttatcactccagatacatggaaagatggtgctaggaataccacagaaagtggtggaagaaagctgaatgaaaataaagctttgacttcaaaaaaagcaagatttgatccatatggaaagaataagttctccacttgtagaatttgtaaaagttctgtgcaccaaccaggttctcattactgccagggctgtgcctacaaaaaaggcatctgtgcgatgtgtggaaaaaaggttttggataccaaaaactacaagcaaacatctgtctagatgtattgatggaatttctggctttctaaatgattttactttctgccttgaattttcaaggcatagatgtcaacttacagaataacatgttttaagataattaagtttaaaccagagattgatgttactcatttgctctcatgttctaacagcacagtgtactagtctttgtggtaaatggttattttccttataagaattttaagaactaagtggcaaattccatgaaaatatttctcagttctgtatgcacttttatttaacattattcatataattctccccccaccactttatttatagatactgcccaagtgagaaggagataatagatactttgctctgaatttggcatccagagtaacatttctcccctcactcccttgctggtgtcatagttattagaatcagcagcctcttaactaattgcggtttcatggatatataaatgtttcaagccattattgctgaatggttctttagttattaacctagacccaattcaaagaccagttggatttatgatattttttatttgttcttgcagccaaagtgccagtttctttaatatgtgaccaagaacacaaggagcatccatatggccaaataaatacatgaattttagaaaaaacatattactttgaattcaaattgtcatgaaaaccagaacagtgtttgtccttgttgcatgtaatgaaaataaatccatgctatgagaaaagctctttgaagctaaaaaaaaaaaaaaaaaaaaaaaaaaag

SEQ ID NO: 364 - protein, 101 aa, Homo sapien
MVCEKCEKKLGTVITPDTWKDGARNTTESGGRKLNENKALTSKKARFDPYGKNKFSTCRICKSSVHQPGSHYCQGCAYKKGICAMCGKKVLDTKNYKQTSV

SEQ ID NO: 365 - DNA, 814 bp, Homo sapien
agaatcccggacagccctgctccctgcagccaggtgtagtttcgggagccactggggccaaagtgagagtccagcggtcttccagcgcttgggccacggcggcggccctgggagcagaggtggagcgaccccattacgctaaagatgaaaggctggggttggctggccctgcttctgggggccctgctgggaaccgcctgggctcggaggagccaggatctccactgtggagcatgcagggctctggtggatgaactagaatgggaaattgcccaggtggaccccaagaagaccattcagatgggatctttccggatcaatccagatggcagccagtcagtggtggaggtgccttatgcccgctcagaggcccacctcacagagctgctggaggagatatgtgaccggatgaaggagtatggggaacagattgatccttccacccatcgcaagaactacgtacgtgtagtgggccggaatggagaatccagtgaactggacctacaaggcatccgaatcgactcagatattagcggcaccctcaagtttgcgtgtgagagcattgtggaggaatacgaggatgaactcattgaattcttttcccgagaggctgacaatgttaaagacaaactttgcagtaagcgaacagatctttgtgaccatgccctgcacatatcgcatgatgagctatgaaccactggagcagcccacactggcttgatggatcacccccaggaggggaaaatggtggcaatgccttttatatattatgtttttactgaaattaactgaaaaaatatgaaaccaaaagtac

SEQ ID NO: 366 - protein, 182 aa, Homo sapien
MKGWGWLALLLGALLGTAWARRSQDLHCGACRALVDELEWEIAQVDPKKTIQMGSFRINPDGSQSVVEVPYARSEAHLTELLEEICDRMKEYGEQIDPSTHRKNYVRVVGRNGESSELDLQGIRIDSDISGTLKFACESIVEEYEDELIEFFSREADNVKDKLCSKRTDLCDHALHISHDEL

SEQ ID NO: 367 - DNA, 821 bp, Homo sapien
tccggtcttgtccacgctagggggtgcacgtactcccaactgtggtcgcgctctcaccccttctgctgctctcgtggccccctcgcgatggcgggcatcctgtttgaggatattttcgatgtgaaggatattgacccggagggcaagaagtttgaccgagtgtctcgactgcattgtgagagtgaatctttcaagatggatctaatcttagatgtaaacattcaaatttaccctgtagacttgggtgacaagttccggttggtcatagctagtaccttgtatgaagatggtaccctggatgatggtgaatacaaccccactgatgataggccttccagggctgaccagtttgagtatgtaatgtatggaaaagtgtacaggattgagggagatgaaacttctactgaagcagcaacacgcctctctgcgtacgtgtcctatgggggcctgctcatgaggctgcagggggatgccaacaacctgcatggattcgaggtggactccagagtttatctcctgatgaagaagctagccttctgaacctcgcctgaagccagcctctctgccaagtcactcaggtcatgggcattgttcaagcctgagtggcagccgctcttgctcacctgttgaggaagggctggctcactgtccaccgtggcggcatctttaactggcctccactcaatgggaaactgactcgcctgtgaaagacacagtgggagagctgaaaatgaatcagaagctttatgtatatgatttttaaattaaactttactttttcagactgcccctcccctttttgtaaaaagtccatttactgt

SEQ ID NO: 368 - protein, 150 aa, Homo sapien
MAGILFEDIFDVKDIDPEGKKFDRVSRLHCESESFKMDLILDVNIQIYPVDLGDKFRLVIASTLYEDGTLDDGEYNPTDDRPSRADQFEYVMYGKVYRIEGDETSTEAATRLSAYVSYGGLLMRLQGDANNLHGFEVDSRVYLLMKKLAF

SEQ ID NO: 369 - DNA, 1590 bp, Homo sapien
gaggcagttctgttgccactctctctcctgtcaatgatggatctcagaaataccccagccaaatctctggacaagttcattgaagactatctcttgccagacacgtgtttccgcatgcaaatcgaccatgccattgacatcatctgtgggttcctgaaggaaaggtgcttccgaggtagctcctaccctgtgtgtgtgtccaaggtggtaaagggtggctcctcaggcaagggcaccaccctcagaggccgatctgacgctgacctggttgtcttcctcagtcctctcaccacttttcaggatcagttaaatcgccggggagagttcatccaggaaattaggagacagctggaagcctgtcaaagagagagagcactttccgtgaagtttgaggtccaggctccacgctggggcaacccccgtgcgctcagcttcgtactgagttcgctccagctcggggagggggtggagttcgatgtgctgcctgcctttgatgccctgggtcagttgactggcagctataaacctaacccccaaatctatgtcaagctcatcgaggagtgcaccgacctgcagaaagagggcgagttctccacctgcttcacagaactacagagagacttcctgaagcagcgccccaccaagctcaagagcctcatccgcctagtcaagcactggtaccaaaattgtaagaagaagcttgggaagctgccacctcagtatgccctggagctcctgacggtctatgcttgggagcgagggagcatgaaaacacatttcaacacagcccaaggatttcggacggtcttggaattagtcataaactaccagcaactctgcatctactggacaaagtattatgactttaaaaaccccattattgaaaagtacctgagaaggcagctcacgaaacccaggcctgtgatcctggacccggcggaccctacaggaaacttgggtggtggagacccaaagggttggaggcagctggcacaagaggctgaggcctggctgaattacccatgctttaagaattgggatgggtccccagtgagctcctggattctgctggctgaaagcaacagtacagacgatgagaccgacgatcccaggacgtatcagaaatatggttacattggaacacatgagtaccctcatttctctcatagacccagcacgctccaggcagcatccaccccacaggcagaagaggactggacctgcaccatcctctgaatgccagtgcatcttgggggaaagggctccagtgttatctggaccagttccttcattttcaggtgggactcttgatccagagaagacaaagctcctcagtgagctggtgtataatccaagacagaacccaagtctcctgactcctggccttctatgccctctatcctatcatagataacattctccacagcctcacttcattccacctattctctgaaaatattccctgagagagaacagagagatttagataagagaatgaaattccagccttgactttcttctgtgcacctgatgggagggtaatgtctaatgtattatcaataacaataaaaataaagcaaataccaaaaa

SEQ ID NO: 370 - protein, 400 aa, Homo sapien
MMDLRNTPAKSLDKFIEDYLLPDTCFRMQIDHAIDIICGFLKERCFRGSSYPVCVSKVVKGGSSGKGTTLRGRSDADLVVFLSPLTTFQDQLNRRGEFIQEIRRQLEACQRERALSVKFEVQAPRWGNPRALSFVLSSLQLGEGVEFDVLPAFDALGQLTGSYKPNPQIYVKLIEECTDLQKEGEFSTCFTELQRDFLKQRPTKLKSLIRLVKHWYQNCKKKLGKLPPQYALELLTVYAWERGSMKTHFNTAQGFRTVLELVINYQQLCIYWTKYYDFKNPIIEKYLRRQLTKPRPVILDPADPTGNLGGGDPKGWRQLAQEAEAWLNYPCFKNWDGSPVSSWILLAESNSTDDETDDPRTYQKYGYIGTHEYPHFSHRPSTLQAASTPQAEEDWTCTIL

SEQ ID NO: 371 - DNA, 1683 bp, Homo sapien
atgggggacgctcccagccctgaagagaaactgcaccttatcacccggaacctgcaggaggttctgggggaagagaagctgaaggagatactgaaggagcgggaacttaaaatttactggggaacggcaaccacgggcaaaccacatgtggcttactttgtgcccatgtcaaagattgcagacttcttaaaggcagggtgtgaggtaacaattctgtttgcggacctccacgcatacctggataacatgaaagccccatgggaacttctagaactccgagtcagttactatgagaatgtgatcaaagcaatgctggagagcattggtgtgcccttggagaagctcaagttcatcaaaggcactgattaccagctcagcaaagagtacacactagatgtgtacagactctcctccgtggtcacacagcacgattccaagaaggctggagctgaggtggtaaagcaggtggagcaccctttgctgagtggcctcttataccccggactgcaggctttggatgaagagtatttaaaagtagatgcccaatttggaggcattgatcagagaaagattttcacctttgcagagaagtacctccctgcacttggctattcaaaacgggtccatctgatgaatcctatggttccaggattaacaggcagcaaaatgagctcttcagaagaggagtccaagattgatctccttgatcggaaggaggatgtgaagaaaaaactgaagaaggccttctgtgagccaggaaatgtggagaacaatggggttctgtccttcatcaagcatgtcctttttccccttaagtccgagtttgtgatcctacgagatgagaaatggggtggaaacaaaacctacacagcttacgtggacctggaaaaggactttgctgctgaggttgtacatcctggagacctgaagaattctgttgaagtcgcactgaacaagttgctggatccaatccgggaaaagtttaatacccctgccctgaaaaaactggccagcgctgcctacccagatccctcaaagcagaagccaatggccaaaggccctgccaagaattcagaaccagaggaggtcatcccatcccggctggatatccgtgtggggaaaatcatcactgtggagaagcacccagatgcagacagcctgtatgtagagaagattgacgtgggggaagctgaaccacggactgtggtgagcggcctggtacagttcgtgcccaaggaggaactgcaggacaggctggtagtggtgctgtgcaacctgaaaccccagaagatgagaggagtcgagtcccaaggcatgcttctgtgtgcttctatagaagggataaaccgccaggttgaacctctggaccctccggcaggctctgctcctggtgagcacgtgtttgtgaagggctatgaaaagggccaaccagatgaggagctcaagcccaagaagaaagtcttcgagaagttgcaggctgacttcaaaatttctgaggagtgcatcgcacagtggaagcaaaccaacttcatgaccaagctgggctccatttcctgtaaatcgctgaaaggggggaacattagctagccagcccagcatcttccccccttcttccaccactgagtcatctgctgtctcttcagtctgctccatccatcacccatttacccatctctcaggaca

SEQ ID NO: 372 - protein, 528 aa, Homo sapien
MGDAPSPEEKLHLITRNLQEVLGEEKLKEILKERELKIYWGTATTGKPHVAYFVPMSKIADFLKAGCEVTILFADLHAYLDNMKAPWELLELRVSYYENVIKAMLESIGVPLEKLKFIKGTDYQLSKEYTLDVYRLSSVVTQHDSKKAGAEVVKQVEHPLLSGLLYPGLQALDEEYLKVDAQFGGIDQRKIFTFAEKYLPALGYSKRVHLMNPMVPGLTGSKMSSSEEESKIDLLDRKEDVKKKLKKAFCEPGNVENNGVLSFIKHVLFPLKSEFVILRDEKWGGNKTYTAYVDLEKDFAAEVVHPGDLKNSVEVALNKLLDPIREKFNTPALKKLASAAYPDPSKQKPMAKGPAKNSEPEEVIPSRLDIRVGKIITVEKHPDADSLYVEKIDVGEAEPRTVVSGLVQFVPKEELQDRLVVVLCNLKPQKMRGVESQGMLLCASIEGINRQVEPLDPPAGSAPGEHVFVKGYEKGQPDEELKPKKKVFEKLQADFKISEECIAQWKQTNFMTKLGSISCKSLKGGNIS

SEQ ID NO: 373 - DNA, 2056 bp, Homo sapien
gagaggcgcccaggcggcggcggcggcggcccagcttcttctttcctcgcacagccaggcggcccctgctcgagtcccgcgtcgccatggccgcggttcccgagttgctgcagcagcaggaggaggaccgcagcaagctgagatctgtatctgtggacctgaatgttgatccctcgcttcagattgacatacctgatgcgctcagtgagagagacaaagtcaaatttacagtgcacacaaagaccacactgcccacgtttcagagcccagagttttctgttacaaggcaacatgaagactttgtgtggctacatgacactcttattgaaacaacagactatgctgggcttattattccacctgctcctacgaagcccgactttgatggtcctcgagagaagatgcagaaactgggagaaggtgaagggtctatgaccaaagaagaatttgccaagatgaaacaagaactggaagctgagtatctcgctgtgtttaagaagactgtgtcctcccatgaagtctttcttcagcggctttcttctcaccctgttctcagtaaagatcgcaactttcatgttttcctggaatatgatcaggatctaagtgttaggcggaaaaatactaaagagatgtttggtggcttcttcaaaagtgtggtgaaaagtgctgatgaagtcctttttactggagttaaggaggtagatgacttctttgagcaagagaagaacttccttattaactattacaataggatcaaagattcttgtgtgaaagctgacaaaatgaccagatctcataaaaatgttgccgatgactatatccacaccgcagcctgcttacatagcctggctttagaagagcccacagtcatcaaaaagtacctattgaaggttgctgagctatttgaaaaactaaggaaagtagagggtcgagtttcatcagatgaagatttgaagctaacagagctcctccgatactacatgctcaacattgaagctgctaaggatctcttatacagacgcaccaaagccctcattgactatgagaactcaaacaaagctctggataaggcccggttaaagagcaaagacgtcaagttggctgaggcacaccagcaggagtgctgccagaaatttgaacaactttccgaatctgcaaaagaagaactgataaatttcaaacggaagagagtggcagcatttagaaagaatctaattgaaatgtctgaactggaaataaaacatgccaggaacaatgtctcccttttgcagagctgtattgacttgttcaagaataactgatatgccttcactcagaagaaaagaaatgaatgtgaaagaaagccaagcatcacttgcacttaaatcattaccacggaagatatattagcttcaactttagtttaaaattatgtgaataaatattttgatttctacaaatcttaacatttaaccatgttggtttaaaaatattattgcttgctacttggacataactaatttttccttgtgcatttaatacctctgggcagaatccaaatactgggttctcccgtagttcgtctttagttactaagaaagggtgtaggacacattagccttctggaaacaagtagaagccatcacctggcccatgtccctacaaacccatgattgtcagggaggtgccagttacagcaggtgattcagctacttgaggtcggtaacagaccttccattcctcactgaaggtggggtttgtgtttttgttttgccctgttactccactggtagtcatctggtgtttgtactataacaacagcaagaaaatctcatttatctttatatactctttgcacctcctttttttagtcgagatataaatatttgaggggagagaaatatctacaggtatatatggaaacaaataatgtggtctgctttataagatggccagatctacattaggaaaagtataagccccctccctaatggccgctggggggtgagggcggtgtgttgtatgtctttgggtgtttgtttttttataaagcatataataaaataatcgtgctact

SEQ ID NO: 374 - protein, 404 aa, Homo sapien
MAAVPELLQQQEEDRSKLRSVSVDLNVDPSLQIDIPDALSERDKVKFTVHTKTTLPTFQSPEFSVTRQHEDFVWLHDTLIETTDYAGLIIPPAPTKPDFDGPREKMQKLGEGEGSMTKEEFAKMKQELEAEYLAVFKKTVSSHEVFLQRLSSHPVLSKDRNFHVFLEYDQDLSVRRKNTKEMFGGFFKSVVKSADEVLFTGVKEVDDFFEQEKNFLINYYNRIKDSCVKADKMTRSHKNVADDYIHTAACLHSLALEEPTVIKKYLLKVAELFEKLRKVEGRVSSDEDLKLTELLRYYMLNIEAAKDLLYRRTKALIDYENSNKALDKARLKSKDVKLAEAHQQECCQKFEQLSESAKEELINFKRKRVAAFRKNLIEMSELEIKHARNNVSLLQSCIDLFKNN

SEQ ID NO: 375 - DNA, 1932 bp, Homo sapien
ccggactgcggaaggatggagctggccgccggaagcttctcggaggagcagttctgggaggcctgcgccgagctccagcagcccgctctggccggggccgactggcagctcctagtggagacctcgggcatcagcatctaccggctgctggacaagaagactggacttcatgagtataaagtctttggtgttctggaggactgctcaccaactctactggcagacatctatatggactcagattacagaaaacaatgggaccagtatgttaaagaactctatgaacaagaatgcaacggagagactgtggtctactgggaagtgaagtacccttttcccatgtccaacagagactatgtctaccttcggcagcggcgagacctggacatggaagggaggaagatccatgtgatcctggcccggagcacctccatgcctcagcttggcgagaggtctggggtgatccgggtgaagcaatacaagcagagcctggcgattgagagtgacggcaagaaggggagcaaagttttcatgtattacttcgataacccgggtggccaaattccgtcctggctcattaactgggccgccaagaatggagttcctaacttcttgaaagacatggcaagagcctgtcagaactacctcaagaaaacctaagaaagagaactgggaacattgcatccatgggttgatgtctctggaagtgcaaccacccaatgtctctggaagtgccacctggaagtgccacctggaagtgtctctggaagagcacccaccactgttcagccttcccctgctgtttctgtcttcagaggcctacacactaccacatcctttctaagcatgtttgcctgacatccagctcactcgtctgcttcctttctcgctccccccatcctgggctgggctgccttcttctacagttcaatatggggcagactagggaaacctttgcttgcttactattaggaggggaagtcttcagtagggaacacgatcattccattgtgcaattttacggggatgggtgggcggagggacacaacaaaatttaagaatgactatttgggcgggctggctcttttgcagcttgtgatttcttccagcttgggaggggctgctggaagtggcatttcgttcagagctgactttcagtgcacccaaactggatgacgtgccaatgtccatttgccttatgctttgtggagctgattaggctgggatttgaggtgataatccagtaagtctttcctcgttcctacttgtggaggatcagtagctgttatgatgccagaccatttggagaagtatcagaggcctgaccggacacataatacgacaaccacatttttcctcatcatccatgaggaaatggatgatttctcttttccatatgtcactgggggaaaggctgcctgtacctctcaagctttgcattttactggaaactgaggcgtcaagatggctgtggcagctagcaaaagcaaagatgctttgtgcatagccttgtgaaaaagtatctttctatgcaataagatgaattttcctcccagaatatttagaaatgtagaagggataacagttcacagccaggtaaaatttaactggtggcttaatgactctgcacctttttctcaggaattctgcctaagttgtctgccttttctaccaccaaaaagacttttagttttctatgctttctcctgaattttggtagggtaagtatttctatgtcaaaggcacagccttgatgatctcagggaaaaattttaatcactgtgtataatgatactgaaccttgattaataacagaaattcaggatgtaaagccacagaatgggatttattaatgtgggatacctcagactgtttgttttctttctgggaagaaaagtgtgttctataatgaataaatatagagtggttttt

SEQ ID NO: 376 - protein, 214 aa, Homo sapien
MELAAGSFSEEQFWEACAELQQPALAGADWQLLVETSGISIYRLLDKKTGLHEYKVFGVLEDCSPTLLADIYMDSDYRKQWDQYVKELYEQECNGETVVYWEVKYPFPMSNRDYVYLRQRRDLDMEGRKIHVILARSTSMPQLGERSGVIRVKQYKQSLAIESDGKKGSKVFMYYFDNPGGQIPSWLINWAAKNGVPNFLKDMARACQNYLKKT

SEQ ID NO: 377 - DNA, 1909 bp, Homo sapien
gctggtggtggcgcgcggcgcggcgcggcgatggcggcgggtggcagcgatccgcgggctggcgacgtagaggaggacgcctcacagctcatctttcctaaagagtttgaaacagctgagacacttctaaattcagaagttcatatgcttctggaacatcgaaagcagcagaatgagagtgcagaggacgaacaggagctctcagaagtcttcatgaaaacattaaactacacagcccgtttcagtcgtttcaaaaacagagagaccattgccagtgttcgtagcttgctactccagaaaaagcttcataagtttgagttggcctgtttggccaacctttgcccagagactgctgaggagtccaaggctctaatcccaagcttggagggacggtttgaagatgaggagctgcagcagattcttgatgatatccagacaaagcgcagctttcagtattaatctccaaacatcactgctgctcggagaaaccacatccccaggcataacaccaccttcccactgtctggggctgacttgcacagaaattctgttgaagacagttgagaattcctttggagaaaacagcccagcttggcgtggggttaggttgctgtttcaaataactcacaggcccaggtgacatggaatcttggagcagccttgtgcagtggcagccagtggcttcctgaacgtgcctctgcgaagtgtgagatgaggggtcacataaccacactgttgactacctcattcctggtttttggcctccacatcatcttttttcttaatatttcatgttttaatttcagggtgtttatactttttgaaactagaccagaagatagtagactttatagagaaagaccagttttacctagatactaaaggaagaattaaaccgctgttagtttgaaatgctttttttttttttttttaaatggagatagggtcttaactcttgtccaggctggaggagtgcagtcgtacagtcatggctcactgaagtcttgaccccgctgcctcagcctcccaaataactggggccacaggtgtgcaccacaactctcagctaatttttaaaattttttatagaggtggggttttactatgctgtccagactggtcttaaactcctgggctcaagtgatccccctgccttggcctcccaaactggtgagattacaggcatgagccaccacaactggcctgaaattcttaaaggatgggagtgtcgatgacagcaccttggcatcgttgtgcctaacctgggagacggaagaagcacgccatgggaagtgtttacacttgggggacaagtgctaagtattgtggagcccatagccccttgagatagatggctactttgcctttcttcttgaactgtcttgcagaatgtggatttggggtaagtggtcttgaaggattcatttagtcaccctcaaattaagatttttacttcatctttcttgggcctgcacctccaagataacaaagaagaagcaatggtcgtgccaaagaggtccacaaccaggtgtgcactgttcactgcagcccatttgctgtatgaactgtggttgttgtgtgcccaatgacaaggctactaagaaattcatcatttgaaacgtagaggccgcagcagtcagcgatgtttctgaaatgagcatccttgacgcctgtgtacttcccaggctggatgtgaagctacattaccatgtgagttgtgccattcacagcacagtggtgaggaattgagctcatgaagcaggcaaggaccgaacacctccaccccaacgtagacctgcaggtgctgccccatgacctccaccaaagcccatataaggagcggagttgttaaggactgaagaaaaacttctctggagaaaaataaaattgcaattctacttaaaaaaaa

SEQ ID NO: 378 - protein, 142 aa, Homo sapien
MAAGGSDPRAGDVEEDASQLIFPKEFETAETLLNSEVHMLLEHRKQQNESAEDEQELSEVFMKTLNYTARFSRFKNRETIASVRSLLLQKKLHKFELACLANLCPETAEESKALIPSLEGRFEDEELQQILDDIQTKRSFQY

SEQ ID NO: 379 - DNA, 1182 bp, Homo sapien
gtcctgagcagccaacacaccagcccagacagctgcaagtcaccatggacgctgaaggcctggcgctgctgctgccgcccgtcaccctggcagccctggtggacagctggctccgagaggactgcccagggctcaactacgcagccttggtcagcggggcaggcccctcgcaggcggcgctgtgggccaaatcccctggggtactggcagggcagcctttcttcgatgccatatttacccaactcaactgccaagtctcctggttcctccccgagggatcgaagctggtgccggtggccagagtggccgaggtccggggccctgcccactgcctgctgctgggggaacgggtggccctcaacacgctggcccgctgcagtggcattgccagtgctgccgccgctgcagtggaggccgccaggggggccggctggactgggcacgtggcaggcacgaggaagaccacgccaggcttccggctggtggagaagtatgggctcctggtgggcggggccgcctcgcaccgctacgacctgggagggctggtgatgttgaaggataaccatgtggtgccccccggtggcgtggagaaggcggtgcgggcggccagacaggcggctgacttcgctctgaaggtggaagtggaatgcagcagcctgcaggaggtcgtccaggcagctgaggctggcgccgaccttgtcctgctggacaacttcaagccagaggagctgcaccccacggccaccgcgctgaaggcccagttcccgagtgtggctgtggaagccagtgggggcatcaccctggacaacctcccccagttctgcgggccgcacatagacgtcatctccatggggatgctgacccaggcggtcccagcccttgatttctccctcaagctgtttgccaaagaggtggctccagtgcccaaaatccactagtcctaaaccggaagaggatgacaccggccatgggttaacgtggctcctcaggaccctctgggtcacacatctttagggtcagtgaacaatggggcacatttggcactagcttgagcccaactctggctctgccacctgctgctcctgtgacctgtcagggctgacttcacctctgctcatctcagtttcctaatctgtaaaatgggtctaataaaggatcaaccaaaaaaaaaaaaaaaaaaaa

SEQ ID NO: 380 - protein, 297 aa, Homo sapien
MDAEGLALLLPPVTLAALVDSWLREDCPGLNYAALVSGAGPSQAALWAKSPGVLAGQPFFDAIFTQLNCQVSWFLPEGSKLVPVARVAEVRGPAHCLLLGERVALNTLARCSGIASAAAAAVEAARGAGWTGHVAGTRKTTPGFRLVEKYGLLVGGAASHRYDLGGLVMLKDNHVVPPGGVEKAVRAARQAADFALKVEVECSSLQEVVQAAEAGADLVLLDNFKPEELHPTATALKAQFPSVAVEASGGITLDNLPQFCGPHIDVISMGMLTQAVPALDFSLKLFAKEVAPVPKIH

SEQ ID NO: 381 - DNA, 1565 bp, Homo sapien
taacggtctaaggtagcgagatgatgcgaggggaaaacccgagcagtgtgccaagaggaggaaataggccaatgtggtctgggacggttggatatacttaaacatcttaataatcagagtaattttcatttacaaagagaggtcggtacttaaaataaccctgaaaaataacactggaattccttttctagcattatatttattcctgatttgcctttgccatataatctaatgcttgtttatatagtgtctggtattgtttaacagttctgtcttttctatttaaatgccactaaattttaaattcatacctttccatgattcaaaattcaaaagatcccatgggagatggttggaaaatctccacttcatcctccaagccattcaagtttcctttccagaagcaactgctactgcctttcattcatatgttcttctaaagatagtctacatttggaaatgtatgttaaaagcacgtatttttaaaatttttttcctaaatagtaacacattgtatgtctgctgtgtactttgctatttttatttattttagtgtttcttatatagcagatggaatgaatttgaagttcccagggctgaggatccatgccttctttgtttctaagttatctttcccatagcttttcattatctttcatatgatccagtatatgttaaatatgtcctacatatacatttagacaaccaccatttgttaagtatttgctctaggacagagtttggatttgtttatgtttgctcaaaaggagacccatgggctctccagggtgcactgagtcaatctagtcctaaaaagcaatcttattattaactctgtatgacagaatcatgtctggaacttttgttttctgctttctgtcaagtataaacttcactttgatgctgtacttgcaaaatcacattttctttctggaaattccggcagtgtaccttgactgctagctaccctgtgccagaaaagcctcattcgttgtgcttgaacccttgaatgccaccagctgtcatcactacacagccctcctaagaggcttcctggaggtttcgagattcagatgccctgggagatcccagagtttcctttccctcttggccatattctggtgtcaatgacaaggagtaccttggctttgccacatgtcaaggctgaagaaacagtgtctccaacagagctccttgtgttatctgtttgtacatgtgcatttgtacagtaattggtgtgacagtgttctttgtgtgaattacaggcaagaattgtggctgagcaaggcacatagtctactcagtctattcctaagtcctaactcctccttgtggtgttggatttgtaaggcactttatcccttttgtctcatgtttcatcgtaaatggcataggcagagatgatacctaattctgcatttgattgtcactttttgtacctgcattaatttaataaaatattcttatttattttgttacttggtacaccagcatgtccattttcttgtttattttgtgtttaataaaatgttcagtttaacatcccagtggagaaagttaaaaaa

SEQ ID NO: 382 - protein, 11 aa, Homo sapien
MFSLTSQWRKL

SEQ ID NO: 383 - DNA, 1420 bp, Homo sapien
cccaaatatatatttaatcttgtggttcaaataagcttttggctcacatctaagcacatcataaagaacgctgtagaagaggtgacatgatgaggcgggaagacgaggaagaggagggaacaatgatgaaggcaaaaggggacttagagatgaaggaggaggaagagattagtgagacaggagaactggttggcccttttgtgagtgctatgcccactccaatgccccacaacaagggcacccggttctctgaggcatgggaatatttccacctagctcctgctcgtgctgggcaccatcccaaccagtatgccacctgccgcctgtgtggcaggcaggtgagccgtggccctggggtcaacgtgggcaccactgcactgtggaagcatctgaaaagcatgcacagagaggagctggagaagagtggccatggtcaggctgggcagcgccaggatccaaggccccacgggccccagctccccacaggcattgagggtaactggggtaggctcctggagcaggtgggcaccatggctttgtgggccagccaaagggaaaaggaggtgcttaggagggaaagggcagtggaatggcgggagagggctgtggaaaaaagggagcgagccctggaggaggtggaaagggccatcctggagatgaagtggaaggtgagggctgagaaggaggcatgccagcgggagaaagagctgcctgcagcagtacatcccttccattttgtttaaattgggcttggagaatctattctgaaaacattgactctagacttgtagaaaagagccattttagtttcaactcaaatgtaaagcaaagtagtttggtgacattttgcttttatgtgaaatagtgcacagtatgagttaatctgagcaggtctgaattgaccaaatgcttatctacgaggttcctagagctctgctgacccttggccgaaactctaaaatgtacctattaaagataaatgcttctaccaaagtaaaactctgtgagttgtttcagggcagaatgtaccagccagtcagcgttgtttaacaaaataatcagatttttgcctagcactcggttttggtggagctgacgattttgagggctgaggctggttaggtagctggaatgtgcctatgtgaccagctcacttgcagacaccctgccggaagcagagcttaatcttcctaggactgaggtcttagcacatgtactggtggagtttccagaccaccagtatgaataaaagcttgttctgtgtgacccagcaagtggaaggacaaagaactgtgagcctcagatctttggacctttccaatgcgtctctttctcctgttattgctgcaatgtattttcttgcttatattaaagttgtttcatcagtaaaaaaaaaaaaaaaaaaaaaaaaaaaaaaaaa

SEQ ID NO: 384 - protein, 217 aa, Homo sapien
MRREDEEEEGTMMKAKGDLEMKEEEEISETGELVGPFVSAMPTPMPHNKGTRFSEAWEYFHLAPARAGHHPNQYATCRLCGRQVSRGPGVNVGTTALWKHLKSMHREELEKSGHGQAGQRQDPRPHGPQLPTGIEGNWGRLLEQVGTMALWASQREKEVLRRERAVEWRERAVEKRERALEEVERAILEMKWKVRAEKEACQREKELPAAVHPFHFV

SEQ ID NO: 385 - DNA, 1806 bp, Homo sapien
ggccggagggagcccgcgctcggggcggcggctggaggcagcgcaccgagttcccgcgaggatccatgacctgacggggccccggagccgcgctgcctctcgggtgtcctgggtcggtggggagcccagtgctcgcaggccggcgggcgggccggagggctgcagtctccctcgcggtgagaggaaggcggaggagcgggaaccgcggcggcgctcgcgcggcgcctgcggggggaagggcagttccgggccgggccgcgcctcagcagggcggcggctcccagcgcagtctcagggcccgggtggcggcggcgactggagaaatcaagttgtgcggtcggtgatgcccgagtgagcggggggcctgggcctctgcccttaggaggcaactcccacgcaggccgcaaagggctctcgcggccgagaggcttcgtttcggtttcgcggcggcggcggcgttgttggctgaggggacccgggacacctgaatgcccccggccccggctcctccgacgcgatggggaaggtgctatccaaaatcttcgggaacaaggaaatgcggatcctcatgttgggcctggacgcggccggcaagacaacaatcctgtacaagttgaagctgggccagtcggtgaccaccattcccactgtgggtttcaacgtggagacggtgacttacaaaaatgtcaagttcaacgtatgggatgtgggcggccaggacaagatccggccgctctggcggcattactacactgggacccaaggtctcatcttcgtagtggactgcgccgaccgcgaccgcatcgatgaggctcgccaggagctgcaccgcattatcaatgaccgggagatgagggacgccataatcctcatcttcgccaacaagcaggacctgcccgatgccatgaaaccccacgagatccaggagaaactgggcctgacccggattcgggacaggaactggtatgtgcagccctcctgtgccacctcaggggacggactctatgaggggctcacatggttaacctctaactacaaatcttaatgagcattctccacccatcccctggaaggagagaaatcaaaaacccattcataggattatcgccaccatcacctctttcaattgccactttctcttcttttgaatttgaactctggagttactgttctacagtttggcggggacggggcttgggggttttctcttttgtttgtttccctttctttttcctttttttttttttttttttgttggctttgcgttaggatggctctgatctgacatttgacatgaacacaaagttgccaagatgctccttgttgacttccagcagaatgggaatgggggaaacacagcagttcttgggtaaaagtccctttgtaataataggtttgggatttttttatttcgagagaatctttcattttcctatgtatgcttttttccttttttgcccagtttccttatcacttgctgtagatggcttattttgcattcatgcagactatgttgcaagtctgtttcatctagtaaactgaaaattattgcttaatcaaactgccgtttgtcttttatatttaaggccttccccccccttccttatgagttctaacttagtaatttcaaatgtgaccttttatatctaagaccagtatagtaaacttagcccacagtggcaaataatgagtaatattgtaatatgttccagttgcacctcagtatgttaaacaggtaatgtaagaagttctctgaaatgtcagcaagtaagttctgaaacacatcatgcatgagtaggaataaac

SEQ ID NO: 386 - protein, 175 aa, Homo sapien
MGKVLSKIFGNKEMRILMLGLDAAGKTTILYKLKLGQSVTTIPTVGFNVETVTYKNVKFNVWDVGGQDKIRPLWRHYYTGTQGLIFVVDCADRDRIDEARQELHRIINDREMRDAIILIFANKQDLPDAMKPHEIQEKLGLTRIRDRNWYVQPSCATSGDGLYEGLTWLTSNYKS

SEQ ID NO: 387 - DNA, 1408 bp, Homo sapien
cggcagtgcgcctgcgcaagttacgcgaaagctaacagaatctgcggtgctctgctggcgactggcaggacgcggtgcagagagcggacttccgcgacgcgggtcctacagtgtaggggaagcaatggaagaacttctacctgatggacaaatatgggctaatatggatccagaagaacgaatgttggcagctgctacagcttttacccacatctgtgcagggcagggtgaaggagatgtcaggagagaagcccaatctatccaatatgatccctacagtaaagcttcagtagccccagggaagcgacctgctcttcctgtgcaactacagtacccacatgtagaaagtaatgtcccttcagaaacagtctctgaggcctcccaaagactccgaaagccagtgatgaagagaaaggtgctgcgcagaaagccagatggggaagtattagtaacagatgagtcgattatcagtgaatcagaatctggtacagaaaatgatcaggatctctgggacttaagacaaaggctgatgaatgtacagttccaggaagacaaggaatcttcatttgatgtttcacaaaaatttaacctaccacatgaataccaaggaatttctcaagatcagctcatttgctctctacaaagagaaggaatgggctctccagcttacgaacaagacctgattgttgccagcagacccaagtcctttattctcccaaagctggaccagttaagccgaaaccggggcaagacagaccgggtagcccggtattttgagtacaaacgggactgggactcaatacgtttacctggtgaagatcatagaaaggaattacgctggggtgtccgagagcagatgctttgtcgagcagaaccccaatccaaacctcagcatatatatgtcccaaacaattatctagtaccaacagagaagaaaaggtctgcactccgttggggtgttcgttgtgaccttgcaaatggtgtcatacccaggaagcttcccttccctctttctccttcttaaatctttttaaacttctttcacaggattgtttgagataacctagctctttatatcttcccttttaaatagaaacaactgtcttgagaagctcttcgaaacattttatggtaaggacttcacctatcattggtctttcctagctatatatcacattggtatcagatgatacttccaaattgccactcaaatccagcaattgcaagataaatcatatcagagaaagaacaacagacctggtctttctattttgtcaaattagtaagggccctttgtgtcctgtaactttttttacctatcaatatgagttgctgtgcttcagtgtgtgttttttaagttgctgggcattacacttaccaattaaagaattttggaaattcaaaaaaa

SEQ ID NO: 388 - protein, 340 aa, Homo sapien
GSAPAQVTRKLTESAVLCWRLAGRGAESGLPRRGSYSVGEAMEELLPDGQIWANMDPEERMLAAATAFTHICAGQGEGDVRREAQSIQYDPYSKASVAPGKRPALPVQLQYPHVESNVPSETVSEASQRLRKPVMKRKVLRRKPDGEVLVTDESIISESESGTENDQDLWDLRQRLMNVQFQEDKESSFDVSQKFNLPHEYQGISQDQLICSLQREGMGSPAYEQDLIVASRPKSFILPKLDQLSRNRGKTDRVARYFEYKRDWDSIRLPGEDHRKELRWGVREQMLCRAEPQSKPQHIYVPNNYLVPTEKKRSALRWGVRCDLANGVIPRKLPFPLSPS

SEQ ID NO: 389 - DNA, 1084 bp, Homo sapien
tggaagacttcgagacccatttaggatcacggcgctacggatgacctgagaattaatttatggcacttagaaatcacagatagaagctttaacatcgtggacatcaagcctgctaacatggaggagctgaccgaagtcatcactgcagccgagttccacccgcaccagtgcaacgtgttcgtctacagcagtagcaaagggaccatccgcctgtgtgacatgcgctcctcggccctgtgcgacagacactccaagttttttgaagagcctgaagatcccagcagtaggtccttcttctcagaaataatttcatccatatccgatgtaaaattcagtcatagtgggcggtacatgatgaccagagacttacctgtcggtgaaggtgtgggacctcaacatgggagagcaggccggtggagacccaccaggtccacgagtacctgcgcagcaagctctgctctctctatgagaacgactgcatctttgacaagtttgagtgttgctggaacggttcggatagcgccatcatgaccgggtcctataacaacttcttcaggatgtttgatagagacacgcggagggatgtgaccctggaggcctcgagagagagcagcaaaccgcgcgccagcctcaaaccccggaaggtgtgtacggggggtaagcggaggaaagacgagatcagtgtggacagtctggacttcaacaagaagatcctgcacacagcctggcaccccgtggacaatgtcattgccgtggctgccaccaataacttgtacatattccaggacaaaatcaactagagacgcgaacgtgaggaccaagtcttgtcttgcatagttaagccggacatttttctgtcagagaaaaggcatcattgtccgctccattaagaacagtgacgcacctgctacttcccttcacagacacaggagaaagccgcctccgctggaggcccggtgtggttccgcctcggcgaggcgcgagacaggcgctgctgctcacgtggagacgctctcgaagcagagttgacggacactgctcccaaaaggtcattactcagaataaatgtatttatttcaaaaaa

SEQ ID NO: 390 - protein, 137 aa, Homo sapien
MEELTEVITAAEFHPHQCNVFVYSSSKGTIRLCDMRSSALCDRHSKFFEEPEDPSSRSFFSEIISSISDVKFSHSGRYMMTRDLPVGEGVGPQHGRAGRWRPTRSTSTCAASSALSMRTTASLTSLSVAGTVRIAPS

SEQ ID NO: 391 - DNA, 1940 bp, Homo sapien
gcgccgagcgccgccgccgccgccgccgccgccgctccgctgcccgcgccgcccgcggctcccgatggagactgacgcgccccagcccggcctcgcctccccggactcgccgcacgacccctgcaagatgttcatcgggggactcagttggcagactacgcaggaagggctgcgcgaatacttcggccagttcggggaggtgaaggagtgtctggtgatgcgggaccccctgaccaagagatccaggggtttcggcttcgtcactttcatggaccaggcgggggtggataaagtgctggcgcaatcgcggcacgagctcgactccaaaacaattgaccctaaggtggccttccctcggcgagcacagcccaagatggtgactcgaacgaagaagatctttgtgggggggctgtcggtgaacaccacggtggaggacgtgaagcaatattttgagcagtttgggaaggtggacgacgccatgctgatgtttgacaaaaccaccaaccggcaccgagggttcgggtttgtcacgtttgagagtgaggacatcgtggagaaagtgtgtgaaattcattttcatgaaatcaacaacaaaatggtggaatgtaagaaagctcagccaaaggaggtgatgtcgccaacgggctcagcccgggggaggtctcgagtcatgccctacggaatggacgccttcatgctgggcatcggcatgctgggttacccaggtttccaagccacaacctacgccagccggagttatacaggcctcgcccctggctacacctaccagttccccgaattccgtgtagagcggacccctctcccgagcgccccagtcctccccgagcttacagccattcctctcactgcctacggaccaatggcggcggcagcggcggcagcggctgtggttcgagggacaggctctcacccctggacgatggctccccctccaggttcgactcccagccgcacagggggcttcctggggaccaccagccccggccccatggccgagctctacggggcggccaaccaggactcgggggtcagcagttacatcagcgccgccagccctgcccccagcaccggcttcggccacagtcttgggggccctttgattgccacagccttcaccaatgggtaccactgaagcaggggacggtggcaggagcgccccagcctgcagctgactgaggaccacgagtgagccagcgagggggcgggagacctcagccgcagccgccgccccctcccctgcagcgactcggacccgctactgcctgcccccaactccccgggcccggcccctgccctgctgcccccaacagcgtctggctcccctactaacgtccccctcttcgcccttgcccccatccccacccgcccctctcccggccctgcttttatttattttggattagccggttgcccaccccagccctctggtccatccctccctccgtgccgcgcccccctaggaccgccccctccccaaaaggcttttggatttgtgcatagctggagtgaaggcggagggagcctgctacaggccgcagcccaacccctgttttttattcagatttcccctcctttaccctttcccttttttttttttttttttttttgtttaaagaaaccttttttaaactatttctaggtttgtgaatgtgaagccccaggccgcagggggcaaggggccaggtgccccccaccagctgagaacaaagtgtctatctgggtgtgggcccctggccgcctccctccagccctggagaggagggcagggctgcggggaggccaggccgagcccctggaaccatcccgtcctgtatcatatgtaaatactgtgaggtgatgtgcccacccctctctaagacccctcgggggtgaggggctcccccctcccctgtttctgtcccctcagacaccgttactgt

SEQ ID NO: 392 - protein, 362 aa, Homo sapien
METDAPQPGLASPDSPHDPCKMFIGGLSWQTTQEGLREYFGQFGEVKECLVMRDPLTKRSRGFGFVTFMDQAGVDKVLAQSRHELDSKTIDPKVAFPRRAQPKMVTRTKKIFVGGLSVNTTVEDVKQYFEQFGKVDDAMLMFDKTTNRHRGFGFVTFESEDIVEKVCEIHFHEINNKMVECKKAQPKEVMSPTGSARGRSRVMPYGMDAFMLGIGMLGYPGFQATTYASRSYTGLAPGYTYQFPEFRVERTPLPSAPVLPELTAIPLTAYGPMAAAAAAAAVVRGTGSHPWTMAPPPGSTPSRTGGFLGTTSPGPMAELYGAANQDSGVSSYISAASPAPSTGFGHSLGGPLIATAFTNGYH

SEQ ID NO: 393 - DNA, 1821 bp, Homo sapien
cgcgtgaactgcttcctgcaggctggccatggcgcttcacgttcccaaggctccgggctttgcccagatgctcaaggagggagcgaaacacttttcaggattagaagaggctgtgtatagaaacatacaagcttgcaaggagcttgcccaaaccactcgtacagcatatggaccaaaaggaatgaacaaaatggttatcaaccacttggagaagttgtttgtgacaaacgatgcagcaactattttaagagaactagaagtacagcatcctgctgcaaaaatgattgtaatggcttctcatatgcaagagcaagaagttggagatggcacaaactttgttctggtatttgctggagctctcctggaattagctgaagaacttctgaggattggcctgtcagtttcagaggtcatagaaggttatgaaatagcctgcagaaaagctcatgagattcttcctaatttggtatgttgttctgcaaaaaaccttcgagatattgatgaagtctcatctctacttcgtacctccataatgagtaaacaatatggtaatgaagtatttctggccaagcttattgctcaggcatgcgtatctatttttcctgattccggccatttcaatgttgataacatcagagtttgtaaaattctgggctctggtatcagttcctcttcagtattgcatggcatggtttttaagaaggaaaccgaaggtgatgtaacatctgtcaaagatgcaaaaatagcagtgtactcttgtccttttgatggcatgataacagaaactaagggaacagtgttgataaagactgctgaagaattgatgaattttagtaagggagaagaaaacctcatggatgcacaagtcaaagctattgctgatactggtgcaaatgtcgtagtaacaggtggcaaagtggcagacatggctcttcattatgcaaataaatataatatcatgttagtgaggctaaactcaaaatgggatctccgaagactttgtaaaactgttggtgctacagctcttcctagattgacacctcctgtccttgaagaaatgggacactgtgacagtgtttacctctcagaagttggagatactcaggtggtggtttttaagcatgaaaaggaagatggcgccatttctaccatagtacttcgaggctctacagacaatctgatggatgacatagaaagggtagtagacgatggtgttaatactttcaaagttcttacaagggataaacgtcttgtacccggaggtggagcaacagaaattgaattagccaaacagatcacatcatatggagagacatgtcctggacttgaacagtatgctattaagaagtttgctgaggcatttgaagctattccccgcgcactggcagaaaactctggagttaaggccaatgaagtaatctctaaactttatgcagtacatcaagaaggaaataaaaacgttggattagatattgaggctgaagtccctgctgtaaaggacatgctggaagctggtattctagatacttacctgggaaaatattgggctatcaaactcgctactaatgctgcagtcactgtacttagagtggatcagatcatcatggcaaaaccagctggtgggcccaagcctccaagtgggaagaaagactgggatgatgaccaaaatgattgaaattggcttaatttttactgtaggtgaaggctgtatttgtagtagtactcaagaatcacctgatgttttcttattctccttaaattaagagttattttgtgtttgtattcttggctggatgttataataaacatattgttactgtc

SEQ ID NO: 394 - protein, 548 aa, Homo sapien
MALHVPKAPGFAQMLKEGAKHFSGLEEAVYRNIQACKELAQTTRTAYGPKGMNKMVINHLEKLFVTNDAATILRELEVQHPAAKMIVMASHMQEQEVGDGTNFVLVFAGALLELAEELLRIGLSVSEVIEGYEIACRKAHEILPNLVCCSAKNLRDIDEVSSLLRTSIMSKQYGNEVFLAKLIAQACVSIFPDSGHFNVDNIRVCKILGSGISSSSVLHGMVFKKETEGDVTSVKDAKIAVYSCPFDGMITETKGTVLIKTAEELMNFSKGEENLMDAQVKAIADTGANVVVTGGKVADMALHYANKYNIMLVRLNSKWDLRRLCKTVGATALPRLTPPVLEEMGHCDSVYLSEVGDTQVVVFKHEKEDGAISTIVLRGSTDNLMDDIERVVDDGVNTFKVLTRDKRLVPGGGATEIELAKQITSYGETCPGLEQYAIKKFAEAFEAIPRALAENSGVKANEVISKLYAVHQEGNKNVGLDIEAEVPAVKDMLEAGILDTYLGKYWAIKLATNAAVTVLRVDQIIMAKPAGGPKPPSGKKDWDDDQND

SEQ ID NO: 395 - DNA, 1757 bp, Homo sapien
agtcctgcgatttcggtgtagaggagcaggggctgcgggacctggtgtgggtggagtgggacaagcggtggagaagggtacgccagggtcgctgagagactctgttctccctggagggactggttgccatgagagcagccgtctgaggggacgcagcctgcactacgcgccccaagaggctgtgcgtggcgagcaggtcacgtgacgggagcgcgggctttggaaggcggctgaacgtcaggccacccgccgctaagctgagaagggagagcgagcttaggaccgcctgcccggggcaaccccgaaccaagctttagccgccgaggccgcgtgtcccaaaggccagtcatccctcctctgtgttgccatgggaattcaaggcctggccaaactaattgctgatgtggcccccagtgccatccgggagaatgacatcaagagctactttggccgtaaggtggccattgatgcctctatgagcatttatcagttcctgattgctgttcgccagggtggggatgtgctgcagaatgaggagggtgagaccaccagccacctgatgggcatgttctaccgcaccattcgcatgatggagaacggcatcaagcccgtgtatgtctttgatggcaagccgccacagctcaagtcaggcgagctggccaaacgcagtgagcggcgggctgaggcagagaagcagctgcagcaggctcaggctgctggggccgagcaggaggtggaaaaattcactaagcggctggtgaaggtcactaagcagcacaatgatgagtgcaaacatctgctgagcctcatgggcatcccttatcttgatgcacccagtgaggcagaggccagctgtgctgccctggtgaaggctggcaaagtctatgctgcggctaccgaggacatggactgcctcaccttcggcagccctgtgctaatgcgacacctgactgccagtgaagccaaaaagctgccaatccaggaattccacctgagccggattctgcaggagctgggcctgaaccaggaacagtttgtggatctgtgcatcctgctaggcagtgactactgtgagagtatccggggtattgggcccaagcgggctgtggacctcatccagaagcacaagagcatcgaggagatcgtgcggcgacttgaccccaacaagtaccctgtgccagaaaattggctccacaaggaggctcaccagctcttcttggaacctgaggtgctggacccagagtctgtggagctgaagtggagcgagccaaatgaagaagagctgatcaagttcatgtgtggtgaaaagcagttctctgaggagcgaatccgcagtggggtcaagaggctgagtaagagccgccaaggcagcacccagggccgcctggatgatttcttcaaggtgaccggctcactctcttcagctaagcgcaaggagccagaacccaagggatccactaagaagaaggcaaagactggggcagcagggaagtttaaaaggggaaaataaatgtgtttccccattatacctccttcaccccagaatatttgccgtcttgtacccttaagagctacagctagagaaaccttcacggggtggagagaggattctaaggcttttctagcgtgacccttttcagtagtgctagtcccttttttacttgatcttaatggcaagaaggccacagaggtacttttcctttttttagctcaggaaaatatgtcaggctcaaaccacttctcaggcagtttaatgg

SEQ ID NO: 396 - protein, 380 aa, Homo sapien
MGIQGLAKLIADVAPSAIRENDIKSYFGRKVAIDASMSIYQFLIAVRQGGDVLQNEEGETTSHLMGMFYRTIRMMENGIKPVYVFDGKPPQLKSGELAKRSERRAEAEKQLQQAQAAGAEQEVEKFTKRLVKVTKQHNDECKHLLSLMGIPYLDAPSEAEASCAALVKAGKVYAAATEDMDCLTFGSPVLMRHLTASEAKKLPIQEFHLSRILQELGLNQEQFVDLCILLGSDYCESIRGIGPKRAVDLIQKHKSIEEIVRRLDPNKYPVPENWLHKEAHQLFLEPEVLDPESVELKWSEPNEEELIKFMCGEKQFSEERIRSGVKRLSKSRQGSTQGRLDDFFKVTGSLSSAKRKEPEPKGSTKKKAKTGAAGKFKRGK

SEQ ID NO: 397 - DNA, 1504 bp, Homo sapien
cctaagatgagctttccatgtaaatttgtagccagcttccttctgattttcaatgtttcttccaaaggtgcagtctccaaagagattacgaatgccttggaaacctggggtgccttgggtcaggacatcaacttggacattcctagttttcaaatgagtgatgatattgacgatataaaatgggaaaaaacttcagacaagaaaaagattgcacaattcagaaaagagaaagagactttcaaggaaaaagatacatataagctatttaaaaatggaactctgaaaattaagcatctgaagaccgatgatcaggatatctacaaggtatcaatatatgatacaaaaggaaaaaatgtgttggaaaaaatatttgatttgaagattcaagagagggtctcaaaaccaaagatctcctggacttgtatcaacacaaccctgacctgtgaggtaatgaatggaactgaccccgaattaaacctgtatcaagatgggaaacatctaaaactttctcagagggtcatcacacacaagtggaccaccagcctgagtgcaaaattcaagtgcacagcagggaacaaagtcagcaaggaatccagtgtcgagcctgtcagctgtccagagaaaggtctggacatctatctcatcattggcatatgtggaggaggcagcctcttgatggtctttgtggcactgctcgttttctatatcaccaaaaggaaaaaacagaggagtcggagaaatgatgaggagctggagacaagagcccacagagtagctactgaagaaaggggccggaagccccaacaaattccagcttcaacccctcagaatccagcaacttcccaacatcctcctccaccacctggtcatcgttcccaggcacctagtcatcgtcccccgcctcctggacaccgtgttcagcaccagcctcagaagaggcctcctgctccgtcgggcacacaagttcaccagcagaaaggcccgcccctccccagacctcgagttcagccaaaacctccccatggggcagcagaaaactcattgtccccttcctctaattaaaaaagatagaaactgtctttttcaataaaaagcactgtggatttctgccctcctgatgtgcatatccgtacttccatgaggtgttttctgtgtgcagaacattgtcacctcctgaggctgtgggccacagccacctctgcatcttcgaactcagccatgtggtcaacatctggagtttttggtctcctcagagagctccatcacaccagtaaggagaagcaatataagtgtgattgcaagaatggtagaggaccgagcacagaaatcttagagatttcttgtcccctctcaggtcatgtgtagatgcgataaatcaagtgattggtgtgcctgggtctcactacaagcagcctatctgcttaagagactctggagtttcttatgtgccctggtggacacttgcccaccatcctgtgagtaaaagtgaaataaaagctttgac

SEQ ID NO: 398 - protein, 351 aa, Homo sapien
MSFPCKFVASFLLIFNVSSKGAVSKEITNALETWGALGQDINLDIPSFQMSDDIDDIKWEKTSDKKKIAQFRKEKETFKEKDTYKLFKNGTLKIKHLKTDDQDIYKVSIYDTKGKNVLEKIFDLKIQERVSKPKISWTCINTTLTCEVMNGTDPELNLYQDGKHLKLSQRVITHKWTTSLSAKFKCTAGNKVSKESSVEPVSCPEKGLDIYLIIGICGGGSLLMVFVALLVFYITKRKKQRSRRNDEELETRAHRVATEERGRKPQQIPASTPQNPATSQHPPPPPGHRSQAPSHRPPPPGHRVQHQPQKRPPAPSGTQVHQQKGPPLPRPRVQPKPPHGAAENSLSPSSN

SEQ ID NO: 399 - DNA, 1164 bp, Homo sapien
ctggtgtgagccaccacgcccagctcaaaaacaatttttttaggggcacttctacaaatcatgaaagggggataaaagcactgactttaaaaagccatgtttaagatgctataaatgttctccccttttcattgattggagagttgtagaggaccttagagatcattttgtctaactccctcatcccaaagataaactgaggcctagagatcgttcagggtgttgtaactgggaacatctgaatgctgaggcctagagatcgttcagggtgttgtaactgggaacatctgaatgctgaggcctagagatcgttcagggtgttgtaactgggaacatctgaatgctgaggcctagagatcgttcagggtgttgtaactgggaacatctgaatgctgaggcctagagatcgttcagggtgttgtaactgggaacatctgaatgctgaggcctagagatcgttcagggtgttgtaactgggaacatctgaatgctgaggcctagagatcgttcagggtgttgtaactgggaacatctgaatgctgaggcttagtccagtgttctctctcccttaccactcctcttccccttccctctataatggcagtacccagggcccggtccatagactactatcgagtgctcctatgtgcatcttagtacgtatcattttcccttgcctttttccttctatcctttcagtggtagcaactgcccttgctaatcaccgtaacctcggctgagaaagaagaggaagcgaaatccaagatgcagctcagttcatcaaagcctagcaggtcccctcagctgccttttcatgcctgccacagactacagtaggacaaaacctgacctggtctttgaagttaagagctaagaaagcttcctatagtagtatctcccatggcacttaccacattctatctggtattacaattatttgtatgcaattaatcactcttagattgtatgttcctggagggcagaatatgcccattcatatttgtatcttcttccttctgctcttggcacctaacacagtgccttgcacacaaacaataaatgattgttgagtgaataagtaaacctgattgtggtgttctattgctttttcagcaagaagtcaaactgatggcctttaagtcagagaagcagcaatggagcaac

SEQ ID NO: 400 - protein, 33 aa, Homo sapien
GVSHHAQLKNNFFRGTSTNHERGIKALTLKSHV

SEQ ID NO: 401 - DNA, 1109 bp, Homo sapien
ggcggcgacggatcgagctcaccgcgccgagcgcgccggcaccgcctgcaccgcccttccgcccgccctccggacggccgcagcctgcggtctccgtccagacccacccccgccccaccccgcgcgcctctgccgcctcttccagagacccagcttgccgagcggccgccgctgccgtgtcgccgccgccgccgccaccgcgccaggttccggccgcggccaccctccgccgtccagggcctctccgtctcggccccgggaccccgcctccccgccagccccggccccggccccggcaccatgtcggagaaaagcgtggaggcagcggccgagttgagcgccaaggacctgaaggagaagaaggagaaggtggaggagaaggcaagccggaaagagcgaaagaaagaagtggtggaggaggaggagaacggggctgaggaggaagaagaagaaactgccgaggatggagaggaggaagatgaaggggaagaagaagatgaggaagaagaagaagaggatgatgaagggcccgcgctgaagagagctgccgaagaggaggatgaagcggatcccaaacggcagaagacagaaaatggggcatcggcgtgacgcctgccaacaggctgggttgggaggcctctctgggctggaggtgggggtgggggcagccaagtccagccactcttcacctggctccctgctctgggccctgcaccgagagctgccaccctcttctttctccccagccttctcatttccgcctctccagacactgcgccctccaccctcactctgccattgttccacctcctgacctgctccatctgagctctccagctggcccccaattgctcctctctctctttgctctctttctccctcccctaccagcctcattcttctccggtagcctctcccacctaacctctgcatcccccagcgtcatgtcctgccccatccctatcctgcctgatccctggatctccctcagatcccctcttctcagacagcgccaggccggggtggggccggggttgccgagccccacagctgcccccctcccctccctttttgtataatttaataaagaaatggtcgcgcttctgttt

SEQ ID NO: 402 - protein, 102 aa, Homo sapien
MSEKSVEAAAELSAKDLKEKKEKVEEKASRKERKKEVVEEEENGAEEEEEETAEDGEEEDEGEEEDEEEEEEDDEGPALKRAAEEEDEADPKRQKTENGASA

SEQ ID NO: 403 - DNA, 1550 bp, Homo sapien
ggcacgagggggaaggcaagatggcggcgcccatggaggtggccgtgtgtacggactcggcggccccgatgtggagctgcatcgtgtgggaacttcactcgggcgccaacctgctcacctaccgcggcggccaggcgggaccccgcggcctggcgctgctcaatggcgagtatctgctggcggcgcagctgggcaagaactacatcagcgcctgggagctgcagcggaaggaccagctccagcagaagatcatgtgccccgggcctgtcacctgtctgactgcatcacccaatggtctctacgtcctggcaggagttgcagaaagcatccacctgtgggaggtctccaccgggaaccttctggtcatcctgagtcgacactaccaggacgtctcctgccttcagttcacaggggacagcagccacttcatctcagggggcaaggactgcctggtgctggtttggagcctctgcagcgtgctgcaggccgacccctccaggattccggcgcccaggcacgtctggtctcaccacacgctccccatcacggacctgcactgcggctttgggggccccctggcccgggtggccacctcctcactggaccagacggtgaagctatgggaggtctcctcgggggagctgctgctctccgtcctctttgacgtgtccatcatggcagtgaccatggacctggctgagcaccatatgttctgcgggggcagtgagggctccatcttccaggtcgacctcttcacctggcccggacagagggagaggagcttccacccagagcaggacgccgggaaggtcttcaaagggcacaggaaccaggtgacttgcctgtcagtgtccactgacggcagcgtgctgctctcaggctcccacgacgagaccgtgcgcctctgggacgtgcagagcaagcagtgcatccggacggtggccctcaaaggcccagtcaccaatgccgccatcctgctggcgcccgtcagcatgctgagctcagacttcaggcccagcctgccgctgccccacttcaacaagcacctgctgggcgccgagcacggggacgagccgcgccacgggggcctcactctgcgcctgggcctccaccagcagggctcggagcccagctacctggaccgcacggagcagctgcaggccgtcctgtgcagcaccatggagaagagcgtgctcggcggccaggaccagctgcgcgtccgtgtgacggagctggaggacgaggtgcgcaacctgcgcaagatcaatcgggacctgttcgacttctccacgcgcttcatcacgcggccggccaagtgaggcccggagaccccggcccgaggcgcccaggcctgagccccatgcctcccagcaaccagggcccgcgggtgtggcccccaccagcccaggcctggactctcctcagttctgtgtcgtgttcgggtttttcctctgtgactgggccgtcttggtgtctcgtggcacgcgtcacagtggtgctagtctgtttttaacaaaagaggatgaaaagccaaaaaaaaaaaaaaaaaa

SEQ ID NO: 404 - protein, 438 aa, Homo sapien
HEGEGKMAAPMEVAVCTDSAAPMWSCIVWELHSGANLLTYRGGQAGPRGLALLNGEYLLAAQLGKNYISAWELQRKDQLQQKIMCPGPVTCLTASPNGLYVLAGVAESIHLWEVSTGNLLVILSRHYQDVSCLQFTGDSSHFISGGKDCLVLVWSLCSVLQADPSRIPAPRHVWSHHTLPITDLHCGFGGPLARVATSSLDQTVKLWEVSSGELLLSVLFDVSIMAVTMDLAEHHMFCGGSEGSIFQVDLFTWPGQRERSFHPEQDAGKVFKGHRNQVTCLSVSTDGSVLLSGSHDETVRLWDVQSKQCIRTVALKGPVTNAAILLAPVSMLSSDFRPSLPLPHFNKHLLGAEHGDEPRHGGLTLRLGLHQQGSEPSYLDRTEQLQAVLCSTMEKSVLGGQDQLRVRVTELEDEVRNLRKINRDLFDFSTRFITRPAK

SEQ ID NO: 405 - DNA, 3986 bp, Homo sapien
atgctggggaagagccatggtaggaccactcatggccctcttcctttggcggaccttggaatccaccttccctgcgttaaagtgctccaccaggtgacgccggaagagaagccagcaggcggcggcggcgtcagcatcagcggcctcctgcccgtatctatcgtggcggcgacgggacccgcctccctgggcgccggagtcatgtgacccacacaatggctgagtggctactctcggcttcctggcaacgccgagcgaaagctatgactgcggccgcgggttcggcgggccgcgccgcggtgcccttgctgctgtgtgcgctgctggcgcccggcggcgcgtacgtgctcgacgactccgacgggctgggccgggagttcgacggcatcggcgcggtcagcggcggcggggcaacctcccgacttctagtaaattacccagagccctatcgttctcagatattggattatctctttaagccgaattttggtgcctctttgcatattttaaaagtggaaataggtggtgatgggcagacaacagacggcactgagccctcccacatgcattatgcactagatgagaattatttccgaggatacgagtggtggttgatgaaagaagctaagaagaggaatcccaatattacactcattgggttgccatggtcattccctggatggctgggaaaaggtttcgactggccttatgtcaatcttcagctgactgcctattatgtcgtgacctggattgtgggcgccaagcgttaccatgatttggacattgattatattggaatttggaatgagaggtcatataatgccaattatattaagatattaagaaaaatgctgaattatcaaggtctccagcgagtgaaaatcatagcaagtgataatctctgggagtccatctctgcatccatgctccttgatgccgaactcttcaaggtggttgatgttataggggctcattatcctggaacccattcagcaaaagatgcaaagttgactgggaagaagctttggtcttctgaagactttagcactttaaatagtgacatgggtgcaggctgctggggtcgcattttaaatcagaattatatcaatggctatatgacttccacaatcgcatggaatttagtggctagttactatgaacagttgccttatgggagatgcgggttgatgacggcccaagagccatggagtgggcactacgtggtagaatctcctgtctgggtatcagctcataccactcagtttactcaacctggctggtattacctgaagacagttggccatttagagaaaggaggaagctacgtagctctgactgatggcttagggaacctcaccatcatcattgaaaccatgagtcataaacattctaagtgcatacggccatttcttccttatttcaatgtgtcacaacaatttgccacctttgttcttaagggatcttttagtgaaataccagagctacaggtatggtataccaaacttggaaaaacatccgaaagatttctttttaagcagctggattctctatggctccttgacagcgatggcagtttcacactgagcctgcatgaagatgagctgttcacactcaccactctcaccactggtcgcaaaggcagctacccgcttcctccaaaatcccagcccttcccaagtacctataaggatgatttcaatgttgattacccattttttagtgaagctccaaactttgctgatcaaactggtgtatttgaatattttacaaatattgaagaccctggcgagcatcacttcacgctacgccaagttctcaaccagagacccattacgtgggctgccgatgcatccaacacaatcagtattataggagactacaactggaccaatctgactataaagtgtgatgtttacatagagacccctgacacaggaggtgtgttcattgcaggaagagtaaataaaggtggtattttgattagaagtgccagaggaattttcttctggatttttgcaaatggatcttacagggttacaggtgatttagctggatggattatatatgctttaggacgtgttgaagttacagcaaaaaaatggtatacactcacgttaactattaagggtcatttcgcctctggcatgctgaatgacaagtctctgtggacagacatccctgtgaattttccaaagaatggctgggctgcaattggaactcactcctttgaatttgcacagtttgacaactttcttgtggaagccacacgctaatacttaacagggcatcatagaatactctggattttcttcccttctttttggttttggttcagagccaattcttgtttcattggaacagtatatgaggcttttgagactaaaaataatgaagagtaaaaggggagagaaatttatttttaatttaccctgtggaagattttattagaattaattccaaggggaaaactggtgaatctttaacattacctggtgtgttccctaacattcaaactgtgcattggccatacccttaggagtggtttgagtagtacagacctcgaagccttgctgctaacactgaggtagctctcttcatcttatttgcaagcggtcctgtagatggcagtaacttgatcatcactgagatgtatttatgcatgctgaccgtgtgtccaagtgagccagtgtcttcatcacaagatgatgctgccataatagaaagctgaagaacactagaagtagctttttgaaaaccacttcaacctgttatgctttatgctctaaaaagtatttttttattttcctttttaagatgatacttttgaaatgcaggatatgatgagtgggatgattttaaaaacgcctctttaataaactacctctaacactatttctgcggtaatagatattagcagattaattgggttatttgcattatttaatttttttgattccaagttttggtcttgtaaccactataactctctgtgaacgtttttccaggtggctggaagaaggaagaaaacctgatatagccaatgctgttgtagtcgtttcctcagcctcatctcactgtgctgtggtctgtcctcacatgtgcactggtaacagactcacacagctgatgaatgcttttctctccttatgtgtggaaggaggggagcacttagacatttgctaactcccagaattggatcatctcctaagatgtacttactttttaaagtccaaatatgtttatatttaaatatacgtgagcatgttcatcatgttgtatgatttatactaagcattaatgtggctctatgtagcaaatcagttattcatgtaggtaaagtaaatctagaattatttataagaattactcattgaactaattctactatttaggaatttataagagtctaacataggcttagctacagtgaagttttgcattgcttttgaagacaagaaaagtgctagaataaataagattacagagaaaattttttgttaaaaccaagtgatttccagctgatgtatctaatattttttaaaacaaacattatagaggtgtaatttatttacaataaaatgttcctactttaaatatacaattcagtgagttttgataaattgatatacccatgtaaccaacactccagtcaagcttcagaatatttccatcaccccagaaggttctcttgtatacctgctcagtcagttcctttcactcccaattgttggcagccattgataggaattctatcactataggttagttttctttgttccagaacatcatgaaagcggcgtcatgtactgtgtattcttatgaatggtttctttccatcagcataatgatttgagattggtccatgttgtgtgattcagtggtttgttccttcttatttctgaagagttttccattgtatgaatataccacaatttgtttcctccccaccagtttctgatactacaattaaaactgtctacatttac

SEQ ID NO: 406 - protein, 669 aa, Homo sapien
MTAAAGSAGRAAVPLLLCALLAPGGAYVLDDSDGLGREFDGIGAVSGGGATSRLLVNYPEPYRSQILDYLFKPNFGASLHILKVEIGGDGQTTDGTEPSHMHYALDENYFRGYEWWLMKEAKKRNPNITLIGLPWSFPGWLGKGFDWPYVNLQLTAYYVVTWIVGAKRYHDLDIDYIGIWNERSYNANYIKILRKMLNYQGLQRVKIIASDNLWESISASMLLDAELFKVVDVIGAHYPGTHSAKDAKLTGKKLWSSEDFSTLNSDMGAGCWGRILNQNYINGYMTSTIAWNLVASYYEQLPYGRCGLMTAQEPWSGHYVVESPVWVSAHTTQFTQPGWYYLKTVGHLEKGGSYVALTDGLGNLTIIIETMSHKHSKCIRPFLPYFNVSQQFATFVLKGSFSEIPELQVWYTKLGKTSERFLFKQLDSLWLLDSDGSFTLSLHEDELFTLTTLTTGRKGSYPLPPKSQPFPSTYKDDFNVDYPFFSEAPNFADQTGVFEYFTNIEDPGEHHFTLRQVLNQRPITWAADASNTISIIGDYNWTNLTIKCDVYIETPDTGGVFIAGRVNKGGILIRSARGIFFWIFANGSYRVTGDLAGWIIYALGRVEVTAKKWYTLTLTIKGHFASGMLNDKSLWTDIPVNFPKNGWAAIGTHSFEFAQFDNFLVEATR

SEQ ID NO: 407 - DNA, 1578 bp, Homo sapien
acgaacaggccaataaggagggagcagtgcggggtttaaatctgaggctaggctggctcttctcggcgtgctgcggcggaacggctgttggtttctgctggttgtaggtccttggctggtcgggcctccggtgttctgcttctccccgctgagctgctgcctggtgaagaggaagccatggcgctccgagtcaccaggaactcgaaaattaatgctgaaaataaggcgaagatcaacatggcaggcgcaaagcgcgttcctacggcccctgctgcaacctccaagcccggactgaggccaagaacagctcttggggacattggtaacaaagtcagtgaacaactgcaggccaaaatgcctatgaagaaggaagcaaaaccttcagctactggaaaagtcattgataaaaaactaccaaaacctcttgaaaaggtacctatgctggtgccagtgccagtgtctgagccagtgccagagccagaacctgagccagaacctgagcctgttaaagaagaaaaactttcgcctgagcctattttggttgatactgcctctccaagcccaatggaaacatctggatgtgcccctgcagaagaagacctgtgtcaggctttctctgatgtaattcttgcagtaaatgatgtggatgcagaagatggagctgatccaaacctttgtagtgaatatgtgaaagatatttatgcttatctgagacaacttgaggaagagcaagcagtcagaccaaaatacctactgggtcgggaagtcactggaaacatgagagccatcctaattgactggctagtacaggttcaaatgaaattcaggttgttgcaggagaccatgtacatgactgtctccattattgatcggttcatgcagaataattgtgtgcccaagaagatgctgcagctggttggtgtcactgccatgtttattgcaagcaaatatgaagaaatgtaccctccagaaattggtgactttgcttttgtgactgacaacacttatactaagcaccaaatcagacagatggaaatgaagattctaagagctttaaactttggtctgggtcggcctctacctttgcacttccttcggagagcatctaagattggagaggttgatgtcgagcaacatactttggccaaatacctgatggaactaactatgttggactatgacatggtgcactttcctccttctcaaattgcagcaggagctttttgcttagcactgaaaattctggataatggtgaatggacaccaactctacaacattacctgtcatatactgaagaatctcttcttccagttatgcagcacctggctaagaatgtagtcatggtaaatcaaggacttacaaagcacatgactgtcaagaacaagtatgccacatcgaagcatgctaagatcagcactctaccacagctgaattctgcactagttcaagatttagccaaggctgtggcaaaggtgtaacttgtaaacttgagttggagtactatatttacaaataaaattggcaccatgtgccatctgtaaaaaaaaaaaaaaaaaaaaaaaaaaaaaaaaaaaaaa

SEQ ID NO: 408 - protein, 433 aa, Homo sapien
MALRVTRNSKINAENKAKINMAGAKRVPTAPAATSKPGLRPRTALGDIGNKVSEQLQAKMPMKKEAKPSATGKVIDKKLPKPLEKVPMLVPVPVSEPVPEPEPEPEPEPVKEEKLSPEPILVDTASPSPMETSGCAPAEEDLCQAFSDVILAVNDVDAEDGADPNLCSEYVKDIYAYLRQLEEEQAVRPKYLLGREVTGNMRAILIDWLVQVQMKFRLLQETMYMTVSIIDRFMQNNCVPKKMLQLVGVTAMFIASKYEEMYPPEIGDFAFVTDNTYTKHQIRQMEMKILRALNFGLGRPLPLHFLRRASKIGEVDVEQHTLAKYLMELTMLDYDMVHFPPSQIAAGAFCLALKILDNGEWTPTLQHYLSYTEESLLPVMQHLAKNVVMVNQGLTKHMTVKNKYATSKHAKISTLPQLNSALVQDLAKAVAKV

SEQ ID NO: 409 - DNA, 1680 bp, Homo sapien
agagagctgtttactaggcacgactgcgaaggcaagggggcaccagctcaggactgcatctgcctgccatttcccttccactcctcctttctggagtctgacattagaaagccagcgagaaggaagattcaaacaaccaaccctgatttcctgcttctccttttcatgagtgttcctgtggtctctgcacctcctttctgtcccccggcagagggcagtagagatggccggcccaaggcctcggtggcgcgaccagctgctgttcatgagcatcatagtcctcgtgattgtggtcatctgcctgatgttatacgctcttctctgggaggctggcaacctcactgacctgcccaacctgagaatcggcttctataacttctgcctgtggaatgaggacaccagcaccctacagtgtcaccagttccctgagctggaagccctgggggtgcctcgggttggcctgggcctggccaggcttggcgtgtacgggtccctggtcctcaccctctttgccccccagcctctcctcctagcccagtgcaacagtgatgagagagcgtggcggctggcagtgggcttcctggctgtgtcctctgtgctgctggcaggcggcctgggcctcttcctctcctatgtgtggaagtgggtcaggctctccctcccggggcctgggtttctagctctgggcagcgcccaggccttactcatcctcttgcttatagccatggctgtgttccctctgagggctgagagggctgagagcaagcttgagagctgctaaaggcttacgtgattgcaagggttcagttccaaccatagtcagaggtggcacatctgctcagccatctcattttacagctaacgctgatctccagctccagcgatggaacccactacagaggaggtggggcccctgtgtcaaagaggccgaggggcagcaagggcagccagggcacctgtgacttcttagtacaagattgtctgtccttcaggacttccaaggctcccaaagactccctaaaccatgcagctcattgtcacaccaattcctgctttaattaatggatctgagcaaatcttcctctagcttcaggagggtggggagggagtgattgccgtcatggggccagacttccaggctgatttgccaaatgccaaaatgaaacctagcaaagaacttacggcaacaaacgaggacattaaaagagcgagcacctcagtgtctctggggacatggttaaggagcttccactcagcccaccatagtgagtgggccgccataagccatcactggaactccaaccccagaggtccaggagtgatctctgagtgactcaacaaagacaggacacatggggtacaaagacaaggcttgactgcttcaaagcttccctggacctgaagccagacagggcagaggcgtccgctgacaaatcactcccatgatgagaccctggaggactccaaatcctcgctgtgaacaggactggacggttgcgcacaaacaaacgctgccaccctccacttcccaacccagaacttggaaagacattagcacaacttacgcattggggaattgtgtgtattttctagcacttgtgtattggaaaacctgtatggcagtgatttattcatatattcctgtccaaagccacactgaaaacagaggcagagacatgt

SEQ ID NO: 410 - protein, 185 aa, Homo sapien
MAGPRPRWRDQLLFMSIIVLVIVVICLMLYALLWEAGNLTDLPNLRIGFYNFCLWNEDTSTLQCHQFPELEALGVPRVGLGLARLGVYGSLVLTLFAPQPLLLAQCNSDERAWRLAVGFLAVSSVLLAGGLGLFLSYVWKWVRLSLPGPGFLALGSAQALLILLLIAMAVFPLRAERAESKLESC

SEQ ID NO: 411 - DNA, 1935 bp, Homo sapien
ctggtcccgagcacgagctgtgaggggattcacttgtgtgcggaactcctcggaaccatggcgtccctttcccttgcacctgttaacatctttaaggcaggagctgatgaagagagagcagagacagctcgtctgacttcttttattggtgccatcgccattggagacttggtaaagagcaccttgggacccaaaggcatggacaaaattcttctaagcagtggacgagatgcctctcttatggtaaccaatgatggtgccactattctaaaaaacattggtgttgacaatccagcagctaaagttttagttgatatgtcaagggttcaagatgatgaagttggtgatggcactacctctgttaccgttttagcagcagaattattaagggaagcagaatctttaattgcaaaaaagattcatccacagaccatcatagcgggttggagagaagccacgaaggctgcaagagaggcgctgttgagttctgcagttgatcatggttccgatgaagttaaattccgtcaagatttaatgaatattgcgggcacaacattatcctcaaaacttcttactcatcacaaagaccactttacaaagttagctgtagaagcagttctcagactgaaaggctctggcaacctggaggcaattcatattatcaagaagctaggaggaagtttggcagattcctatttagatgaaggcttcctgttggataaaaaaattggagtaaatcaaccaaaacgaattgaaaatgctaaaattcttattgcaaatactggtatggatacagacaaaataaagatatttggttcccgggtaagagttgactctacagcaaaggttgcagaaatagaacatgcggaaaaggaaaaaatgaaggagaaagttgaacgtattcttaagcatggaataaattgctttattaacaggcaattaatttataattatcctgaacagctctttggtgctgctggtgtcatggctattgagcatgcagattttgcaggtgtggaacgcctagctcttgtcacaggtggtgaaattgcctctacctttgatcacccagaactggtgaagcttggaagttgcaaacttatcgaggaagtcatgattggagaagacaaactcattcacttttctggggttgcccttggtgaggcttgtaccattgttttgcgtggtgccactcaacaaattttagatgaagcagaaagatcattgcatgatgctctttgtgttcttgcgcaaactgtaaaggactctagaacagtttatggaggaggctgttctgagatgttgatggctcatgctgtgacacagcttgccaatagaacaccaggcaaagaagctgttgcaatggagtcttatgctaaagcactgagaatgttgccaaccatcatagctgacaatgcaggctatgacagtgcagacctggtggcacagctcagggctgctcacagtgaaggcaataccactgctggattggatatgagggaaggcaccattggagatatggctatcctgggtataacagaaagttttcaagtgaagcgacaggttcttctgagtgcagctgaagcagcagaggtgattctgcgtgtggacaacatcatcaaagcggcacccaggaaacgtgtccctgatcaccacccctgttaagcattcccacgtgctgtcgatctttggaccagtttctagcaaagttgtgtttgaaagatactctattaaagaagactgtggaatctgtttatcggtgcccattatatccttaagtttggatatttagctgaccttcgctttaacataggtctaatttatttgccgtgtcattttccatacaaatcagttgatttaaaggagttcatttcgcatactgggcattaaaataaaaatttgaacaatgaaaggaaaaaaaggagaaaaaaaaaa

SEQ ID NO: 412 - protein, 535 aa, Homo sapien
MASLSLAPVNIFKAGADEERAETARLTSFIGAIAIGDLVKSTLGPKGMDKILLSSGRDASLMVTNDGATILKNIGVDNPAAKVLVDMSRVQDDEVGDGTTSVTVLAAELLREAESLIAKKIHPQTIIAGWREATKAAREALLSSAVDHGSDEVKFRQDLMNIAGTTLSSKLLTHHKDHFTKLAVEAVLRLKGSGNLEAIHIIKKLGGSLADSYLDEGFLLDKKIGVNQPKRIENAKILIANTGMDTDKIKIFGSRVRVDSTAKVAEIEHAEKEKMKEKVERILKHGINCFINRQLIYNYPEQLFGAAGVMAIEHADFAGVERLALVTGGEIASTFDHPELVKLGSCKLIEEVMIGEDKLIHFSGVALGEACTIVLRGATQQILDEAERSLHDALCVLAQTVKDSRTVYGGGCSEMLMAHAVTQLANRTPGKEAVAMESYAKALRMLPTIIADNAGYDSADLVAQLRAAHSEGNTTAGLDMREGTIGDMAILGITESFQVKRQVLLSAAEAAEVILRVDNIIKAAPRKRVPDHHPC

SEQ ID NO: 413 - DNA, 3268 bp, Homo sapien
cggcttcctcccgctttttcttctctctccttgcggtctgaagatgccctcggccaccagccacagcgggagcgcagcaagtcgtccggaccgccaccgccgtcgggttcctccgggagtgaggcggccgcgggagccggggccgccgcgccggcttctcagcaccccgcaaccggcaccggcgctgtccagaccgaggccatgaagcagattctcggggtgatcgacaagaaacttcggaacctggagaagaaaaagggtaagcttgatgattaccaggaacgaatgaacaaaggggaaaggcttaatcaagatcagctggatgccgtttctaagtaccaggaagtcacaaataatttggagtttgcaaaagaattacagaggagtttcatggcactaagtcaagatattcagaaaacaataaagaagacagcacgtcgggagcagcttatgagagaagaagctgaacagaaacgtttaaaaactgtacttgagctacagtatgttttggacaaattgggagatgatgaagtgcggactgacctgaaacaaggtttgaatggagtgccaatattgtccgaagaggagttgtcattgttggatgaattctataagctagtagaccctgaacgggacatgagcttgaggttgaatgaacagtatgaacatgcctccattcacctgtgggacctgctggaagggaaggaaaaacctgtatgtggaaccacctataaagttctaaaggaaattgttgagcgtgtttttcagtcaaactactttgacagcacccacaaccaccagaatgggctgtgtgaggaagaagaggcagactcagcacctgcagttgaagaccaggtacctgaagctgaacctgagccagcagaagagtacactgagcaaagtgaagttgaatcaacagagtatgtaaatagacagttcatggcagaaacacagttcaccagtggtgaaaaggagcaggtagatgagtggacagttgaaacggttgaggtggtaaattcactccagcagcaacctcaggctgcatccccttcagtaccagagccccactctttgactccagtggctcaggcagatccccttgtgagaagacagcgagtacaagaccttatggcacaaatgcagggtcccgataatttcatacaggattcaatgctggattttgaaaatcagacacttgatcctgccattgtatctgcacagcctatgaatccaacacaaaacatggacatgccccagctggtttgccctccagttcattctgaatctagacttgctcagcctaatcaagttcctgtacaaccagaagcgacacaggttcctttggtatcatccacaagtgaggggtacacagcatctcaacccttgtaccagccttctcatgctacagagcaacgaccacagaaggaaccaattgatcagattcaggcaacaatctctttaaatacagaccagactacagcatcatcatcccttcctgctgcgtctcagcctcaagtatttcaggctgggacaagcaaacctttacatagcagtggaatcaatgtaaatgcagctccattccaatccatgcaaacggtgttcaatatgaatgccccagttcctcctgttaatgaaccagaaactttaaaacagcaaaatcagtaccaggccagttataaccagagcttttctagtcagcctcaccaagtagaacaaacagagcttcagcaagaacagcttcaaacagtggttggcacttaccatggttccccagaccagtcccatcaagtgactggtaaccaccagcagcctcctcagcagaacactggatttccacgtagcaatcagccctattacaatagtcgtggtgtgtctcgtggaggctcccgtggtgctagaggcttgatgaatggataccggggccctgcaatggattcagaggaggatatgatggttaccgcccttcattctctaacactccaaacagtggttatacacagtctcagttcagtgctccccgggattactctggctatcaacgggatggatatcagcagaatttcaagcgaggctctgggcagagtggaccacggggagccccacgaggtcgtggagggcccccaagacccaacagagggatgccgcaaatgaacactcagcaagtgaattaatctgattcacaggattatgtttaatcgccaaaaacacactggccagtgtaccataatatgttaccagaagagttattatctatttgttctccctttcaggaaacttattgtaaagggactgttttcatcccataaagacaggactacaattgtcagctttctattacctggatatggaaggaaactatttttactctgcatgttctgtcctaagcgtcatcttgagccttgcacatgatactcagattcctcacccttgcttaggagtaaaacaatatactttacagggtgataataatctccatagttatttgaagtggcttgaaaaaggcaagattgacttttatgacattggataaaatctacaaatcagccctcgagttattcaatgataactgacaaactaaattatttccctagaaaggaagatgaaaggagtggagtgtggtttggccagaacaactgcatttcacagcttttccagttaaattggagcactgaacgttcagatgcataccaaattatgcatgggtcctaatcacacatataaggctggctaccagctttgacacagcactgttcatctggccaaacaactgtggttaaaaacacatgtaaaatggctttttaacagctgatactgtataagacaaagccaagatgcaaaattaggctttgattggcactttttgaaaaatatgcaacaaatatgggatgtaatccggatggccgcttctgtacttaatgtgaaatatttagatacctttttgaacacttaacagtttctttgagacaatgactttgtaaggattggtactatctatcattccttatgacatgtacattgtctgtcactaatccttggattttgctgtattgtcaccgggattggtacaggtactgatgaaaatctctagtggataatcataacactctcggtcacatgtttttccttcagcttgaaagctttttttaaaaggaaaagataccaaatgcctgctgctaccacccttttcaattgctatgttttgaaaggcaccagtatgtgttttagattgatttccctgtttcagggaaatcacggacagtagtttccg

SEQ ID NO: 414 - protein, 649 aa, Homo sapien
MKQILGVIDKKLRNLEKKKGKLDDYQERMNKGERLNQDQLDAVSKYQEVTNNLEFAKELQRSFMALSQDIQKTIKKTARREQLMREEAEQKRLKTVLELQYVLDKLGDDEVRTDLKQGLNGVPILSEEELSLLDEFYKLVDPERDMSLRLNEQYEHASIHLWDLLEGKEKPVCGTTYKVLKEIVERVFQSNYFDSTHNHQNGLCEEEEADSAPAVEDQVPEAEPEPAEEYTEQSEVESTEYVNRQFMAETQFTSGEKEQVDEWTVETVEVVNSLQQQPQAASPSVPEPHSLTPVAQADPLVRRQRVQDLMAQMQGPDNFIQDSMLDFENQTLDPAIVSAQPMNPTQNMDMPQLVCPPVHSESRLAQPNQVPVQPEATQVPLVSSTSEGYTASQPLYQPSHATEQRPQKEPIDQIQATISLNTDQTTASSSLPAASQPQVFQAGTSKPLHSSGINVNAAPFQSMQTVFNMNAPVPPVNEPETLKQQNQYQASYNQSFSSQPHQVEQTELQQEQLQTVVGTYHGSPDQSHQVTGNHQQPPQQNTGFPRSNQPYYNSRGVSRGGSRGARGLMNGYRGPAMDSEEDMMVTALHSLTLQTVVIHSLSSVLPGITLAINGMDISRISSEALGRVDHGEPHEVVEGPQDPTEGCRK

SEQ ID NO: 415 - DNA, 1326 bp, Homo sapien
atggaaggagacttctcggtgtgcaggaactgtaaaagacatgtagtctctgccaacttcaccctccatgaggcttactgcctgcggttcctggtcctgtgtccggagtgtgaggagcctgtccccaaggaaaccatggaggagcactgcaagcttgagcaccagcaggttgggtgtacgatgtgtcagcagagcatgcagaagtcctcgctggagtttcataaggccaatgagtgccaggagcgccctgttgagtgtaagttctgcaaactggacatgcagctcagcaagctggagctccacgagtcctactgtggcagccggacagagctctgccaaggctgtggccagttcatcatgcaccgcatgctcgcccagcacagagatgtctgtcggagtgaacaggcccagctcgggaaaggggaaagaatttcagctcctgaaagggaaatctactgtcattattgcaaccaaatgattccagaaaataagtatttccaccatatgggtaaatgttgtccagactcagagtttaagaaacactttcctgttggaaatccagaaattcttccttcatctcttccaagtcaagctgctgaaaatcaaacttccacgatggagaaagatgttcgtccaaagacaagaagtataaacagatttcctcttcattctgaaagttcatcaaagaaagcaccaagaagcaaaaacaaaaccttggatccacttttgatgtcagagcccaagcccaggaccagctcccctagaggagataaagcagcctatgacattctgaggagatgttctcagtgtggcatcctgcttcccctgccgatcctaaatcaacatcaggagaaatgccggtggttagcttcatcaaaaaggaaaacaagtgagaaatttcagctagatttggaaaaggaaaggtactacaaattcaaaagatttcacttttaacactggcattcctgcctacttgctgtggtggtcttgtgaaaggtgatgggttttattcgttgggctttaaaagaaaaggtttggcagaactaaaaacaaaactcacgtatcatctcaatagatacagaaaaggcttttgataaaattcaacttgacttcatgttaaaaaccctcaacaaaccaggcgtcgaaggaacatacctcaaaataataagagccatctatgacaaaaccacagccaacatcatactgaatgagcaaaagctggagcattactcttgagaagtagaacaaggcacttcagtcctattcaacatagtactggaagtctcgccacagcaatcaggcaagagaaagaagtaaaaggcaccc

SEQ ID NO: 416 - protein, 317 aa, Homo sapien
MEGDFSVCRNCKRHVVSANFTLHEAYCLRFLVLCPECEEPVPKETMEEHCKLEHQQVGCTMCQQSMQKSSLEFHKANECQERPVECKFCKLDMQLSKLELHESYCGSRTELCQGCGQFIMHRMLAQHRDVCRSEQAQLGKGERISAPEREIYCHYCNQMIPENKYFHHMGKCCPDSEFKKHFPVGNPEILPSSLPSQAAENQTSTMEKDVRPKTRSINRFPLHSESSSKKAPRSKNKTLDPLLMSEPKPRTSSPRGDKAAYDILRRCSQCGILLPLPILNQHQEKCRWLASSKRKTSEKFQLDLEKERYYKFKRFHF

SEQ ID NO: 417 - DNA, 3056 bp, Homo sapien
aaactgggagagggaggaagggagaaagtgagaagggaaatcggaaagagaaaagggaggaaacggcagagccagagagaaagaggaagagactgagtgtgaaggagagaggacacaggggatgactgagagacagagagagagagagagagagaatgagacagagacttaaggaagagaccctgtgagtctgacaataaaagatttggacagaaacagaaagattggagagagagagagagggagagaatgagtgagagagagactggaagagacagagatcagagggagacacagaaagtgagagtggggagagaggtagtgtaaaaggaagagagagagagagagaccgtaagagacaggagacaaagagacaaaaagtgtgagtgagcaggtgaggagagagattgagaactatgagagacagcagctaagagacaaaggaggcgggagactgcctaggtgccgcagcacccacaccgtcctcttgcccccccgtcactgggaccccagagctggcccttgatggaggggagccgacctcgcagcagcctgagcctggccagcagcgcctccaccatctcctcgctcagcagcctgagccccaagaagcccacccgggcagtaaacaagatccacgcctttgggaagagaggcaatgcgctcaggagggatcccaaccttcccgtgcacatccgaggctggcttcataagcaggacagctcggggctccgtctctggaaacgccgctggttcgtcctctccggccattgcctcttttattacaaggacagccgcgaggagagtgtcctaggcagcgtcctgctccccagctacaatattagaccagatgggccgggagccccccgagggcggcgcttcaccttcaccgcagagcacccgggcatgaggacctacgttttggccgctgacaccttagaagacctgcggggctggctacgggcgctgggccgggcctcccgtgcggagggggacgactatgggcaacccaggtcacctgcacgaccccagcccggggagggccccggcggccccggtggtcccccggaggtgagcagaggggaagaggggcgcatctcagaatcaccggaagtgactcgactctccagaggtcgtggtagacccaggctgctcactcccagccccacaaccgacctccactctggactccagatgcggagggcgaggagccccgacctgttcacccccctctctcgccctccctcgcctctgagcctcccccgtccccgttctgcccctgcgcggcgaccccctgccccctcaggagacacagcaccccctgcccgacctcacaccccgttgagtcgcattgatgtccgacctcctctggattggggcccccaacgccagaccctctcccgaccccctactccccgccgaggacctccctctgaggctgggggaggaaagccccccaggagtccccagcactggagtcaggagcccagaacacaggcacactctggctcccccacttatctccagctccccccgcggccccctgggacccgggcctccatggttttattgccgggtcctcccctggagtcaactttccaccaaagcttggagacagatacgctgctgaccaagttgtgcgggcaggaccggcttctgcggaggctgcaggaggagatagaccagaagcaggaggagaaggagcaactagaagcagctctggagttgacccggcaacagctgggccaagccaccagggaggctggggctcccgggagggcctggggtcgccagcgcctcttgcaggaccggctggtcagtgtgagggccaccctctgtcacttgactcaggagcgagagagggtttgggacacgtacagtggcctggagcaggagctgggcaccttaagagagacgctggagtacctgctgcaccttggttctccccaggacagagtgtctgctcagcagcagctgtggatggtggaagacacgctggcaggtctgggtggcccccagaaaccgcccccacacactgagcctgactccccatctcccgtgctccagggcgaggagtcctcagagagggagagcctgccagagtccttggaactgagctcccctaggtcccccgagactgactgggggcggcctcctggaggcgacaaagacctcgccagccctcacttaggtcttgggtctccgagggtctcccgggcttccagccctgagggtcgccacctcccttccccacagctaggaaccaaggccccggtggcccggccccggatgaatgcccaggagcagctggagcggatgcgcagaaaccaggaatgtggacggcccttccctcgcccgacctccccccggcttctcaccctgggaaggacactgtccccagccagacgccagcctgacgtggagcaaaggcctgtcgtaggacactcgggagcccagaaatggctcagaagctctgggtcctggagtagtccaaggaacaccaccccttacttgccgacttccgaaggtcaccgggagcgggttctcagcctctcccaagccctggctactgaggcgtcgcagtggcacagaatgatgacaggtggaaatttggactcccagggagaccctcttcccggtgtgccgctgcctccttcggaccccacgcgccaggagacccctccccccagatctcccccggtggctaattcgggttccacggggttctctcgccgagggagtgggcgtggaggaggtcccaccccctgggggcccgcgtgggatgccgggatcgcccctccggtcctgccacaagacgagggggcatggcctctgcgagtcactctgctacaatccagcttgtaatccgcccaaaagcggcagccaatcggagcgcgaggacgtggtctggaggtaccgccgaagatctgggaccactcagggcatcagggggcgtggtctggtccccattgcgggcccgggaggggaatggtttctatggccaaagtttggttttctcaacactgtctaaatttggattaaaactttgaactttt

SEQ ID NO: 418 - protein, 779 aa, Homo sapien
MEGSRPRSSLSLASSASTISSLSSLSPKKPTRAVNKIHAFGKRGNALRRDPNLPVHIRGWLHKQDSSGLRLWKRRWFVLSGHCLFYYKDSREESVLGSVLLPSYNIRPDGPGAPRGRRFTFTAEHPGMRTYVLAADTLEDLRGWLRALGRASRAEGDDYGQPRSPARPQPGEGPGGPGGPPEVSRGEEGRISESPEVTRLSRGRGRPRLLTPSPTTDLHSGLQMRRARSPDLFTPLSRPPSPLSLPRPRSAPARRPPAPSGDTAPPARPHTPLSRIDVRPPLDWGPQRQTLSRPPTPRRGPPSEAGGGKPPRSPQHWSQEPRTQAHSGSPTYLQLPPRPPGTRASMVLLPGPPLESTFHQSLETDTLLTKLCGQDRLLRRLQEEIDQKQEEKEQLEAALELTRQQLGQATREAGAPGRAWGRQRLLQDRLVSVRATLCHLTQERERVWDTYSGLEQELGTLRETLEYLLHLGSPQDRVSAQQQLWMVEDTLAGLGGPQKPPPHTEPDSPSPVLQGEESSERESLPESLELSSPRSPETDWGRPPGGDKDLASPHLGLGSPRVSRASSPEGRHLPSPQLGTKAPVARPRMNAQEQLERMRRNQECGRPFPRPTSPRLLTLGRTLSPARRQPDVEQRPVVGHSGAQKWLRSSGSWSSPRNTTPYLPTSEGHRERVLSLSQALATEASQWHRMMTGGNLDSQGDPLPGVPLPPSDPTRQETPPPRSPPVANSGSTGFSRRGSGRGGGPTPWGPAWDAGIAPPVLPQDEGAWPLRVTLLQSSL

SEQ ID NO: 419 - DNA, 579 bp, Homo sapien
ggcacgagggggacccaaccgcggcgaccggacgtgcactcctccagtagcggctgcacgtcgtgccaatggcccgctatgaggaggtgagcgtgtccggcttcgaggagttccaccgggccgtggaacagcacaatggcaagaccattttcgcctactttacgggttctaaggacgccggggggaaaagctggtgccccgactgcgtgcaggctgaaccagtcgtacgagaggggctgaagcacattagtgaaggatgtgtgttcatctactgccaagtaggagaaaagccttattggaaagatccaaataatgacttcagaaaaaacttgaaagtaacagcagtgcctacactacttaagtatggaacacctcaaaaactggtagaatctgagtgtcttcaggccaacctggtggaaatgttgttctctgaagattaagattttaggatggcaatcatgtcttgatgtcctgatttgttctagtatcaataaactgtatacttgctttgaattcatgttagcaataaatgatgttaaaaaaaaaaaaaaaaaaaaaaaaaaaaaaaaaaaaaaaaaa

SEQ ID NO: 420 - protein, 123 aa, Homo sapien
MARYEEVSVSGFEEFHRAVEQHNGKTIFAYFTGSKDAGGKSWCPDCVQAEPVVREGLKHISEGCVFIYCQVGEKPYWKDPNNDFRKNLKVTAVPTLLKYGTPQKLVESECLQANLVEMLFSED

SEQ ID NO: 421 - DNA, 437 bp, Homo sapien
gaaaaatgtttatataagcgtaaagctggtaggacaggaaaggaagccgaaacaaaaagtaaagaaaaatccacaaggacaacttttggagctagtgcctgagattttggatttctgagtcccaggaggtgctgatatcatttatctgcggactcgtattatgaagcgcaaggtcctagagcgtgtgattttacaggcataaggaatataagatgaaggctgagacaaaataggatgggtggcctaattttcttcccccaccctctcgtccctcccatacacatacaacctgacaactaaaagggccgcactccatggaagaactcctgcagagttggactccccaccggcaaacaggaggaggctatgaagaaacttgcctgtctccgattttcttgggaattgaaaaaataaaatttttaagcctttcatgaaaa

SEQ ID NO: 422 - protein, 38 aa, Homo sapien
KNVYISVKLVGQERKPKQKVKKNPQGQLLELVPEILDF

SEQ ID NO: 423 - DNA, 963 bp, Homo sapien
ctcagcttgcgccgccgccgccgccgccgccgccgcgcacgccatgggagccgtgactgacgacgaagttatacggaagcgtctcctcattgatggagatggtgctggaggtgatcggagaattaatctgctagtgaagagtttcattaaatggtgcaactctgggtcccaggaggagggatatagccagtaccaacgtatgctgagcacgctgtctcaatgtgaattttcaatgggcaaaactttactagtatatgatatgaatctcagagaaatggaaaattatgaaaaaatttacaaggaaatagaatgtagcatagctggagcacatgaaaaaattgctgagtgcaaaaagcaaattcttcaagcaaaacgaatacgaaaaaatcgccaagaatatgatgctttggcaaaagtgattcagcaccatccagacaggcatgagacattaaaggaactagaggctctgggaaaagaattagagcatctttcacacattaaagaaagtgttgaagataagctggaattgagacggaaacagtttcatgttcttcttagtaccatccatgaacttcagcaaacattggaaaatgatgaaaaactctcagaggtagaagaagctcaggaagcaagcatggaatcagatcctaagccatagacaggctaattgcccaccactcccaggaatattgaaatagctacatgaccataatgtgtttaaaatgtggtatgctcttgagatatttaaagttttggcagtaaaatactctgtttttaagtatgaatgtatttcattcatatttcctctcacaaaggaaaatgacttcagtatagatttgtttttattaaaatgcattttttattcttaagtggtaggaagcaacatccaaaaatgcttaataaaatgcttttaagctgcaaaaaaaaaaaaaaaaaaaaaaaaaaaaaaaaaaaaaaaaaaaa

SEQ ID NO: 424 - protein, 204 aa, Homo sapien
MGAVTDDEVIRKRLLIDGDGAGGDRRINLLVKSFIKWCNSGSQEEGYSQYQRMLSTLSQCEFSMGKTLLVYDMNLREMENYEKIYKEIECSIAGAHEKIAECKKQILQAKRIRKNRQEYDALAKVIQHHPDRHETLKELEALGKELEHLSHIKESVEDKLELRRKQFHVLLSTIHELQQTLENDEKLSEVEEAQEASMESDPKP

SEQ ID NO: 425 - DNA, 2077 bp, Homo sapien
ccgagcgccagcgcggggaaccgggaaaaggaaaccgtgttgtgtacgtaagattcaggaaacgaaaccaggagccgcgggtgttggcgcaaaggttactcccagacccttttccggctgacttctgagaaggttgcgcacagctgtgcccggcagtctagaggcgcagaagaggaagccatcgcctggccccggctctctggaccttgtctcgctcgggagcggaaacagcggcagccagagaactgttttaatcatggacaaacaaaactcacagatgaatgcttctcacccggaaacaaacttgccagttgggtatcctcctcagtatccaccgacagcattccaaggacctccaggatatagtggctaccctgggccccaggtcagctacccacccccaccagccggccattcaggtcctggcccagctggctttcctgtcccaaatcagccagtgtataatcagccagtatataatcagccagttggagctgcaggggtaccatggatgccagcgccacagcctccattaaactgtccacctggattagaatatttaagtcagatagatcagatactgattcatcagcaaattgaacttctggaagttttaacaggttttgaaactaataacaaatatgaaattaagaacagctttggacagagggtttactttgcagcggaagatactgattgctgtacccgaaattgctgtgggccatctagaccttttaccttgaggattattgataatatgggtcaagaagtcataactctggagagaccactaagatgtagcagctgttgttgtccctgctgccttcaggagatagaaatccaagctcctcctggtgtaccaataggttatgttattcagacttggcacccatgtctaccaaagtttacaattcaaaatgagaaaagagaggatgtactaaaaataagtggtccatgtgttgtgtgcagctgttgtggagatgttgattttgagattaaatctcttgatgaacagtgtgtggttggcaaaatttccaagcactggactggaattttgagagaggcatttacagacgctgataactttggaatccagttccctttagaccttgatgttaaaatgaaagctgtaatgattggtgcctgtttcctcattgacttcatgttttttgaaagcactggcagccaggaacaaaaatcaggagtgtggtagtggattagtgaaagtctcctcaggaaatctgaagtctgtatattgattgagactatctaaactcatacctgtatgaattaagctgtaaggcctgtagctctggttgtatacttttgcttttcaaattatagtttatcttctgtataactgatttataaaggtttttgtacattttttaatactcattgtcaatttgagaaaaaggacatatgagtttttgcatttattaatgaaacttcctttgaaaaactgctttgaattatgatctctgattcattgtccattttactaccaaatattaactaaggccttattaatttttatataaattatatcttgtcctattaaatctagttacaatttatttcatgcataagagctaatgttattttgcaaatgccatatattcaaaaaagctcaaagataattttctttactattatgttcaaataatattcaatatgcatattatctttaaaaagttaaatgtttttttaatcttcaagaaatcatgctacacttaacttctcctagaagctaatctataccataatattttcatattcacaagatattaaattaccaattttcaaattattgttagtaaagaacaaaatgattctctcccaaagaaagacacattttaaatactccttcactctaaaactctggtattataacttttgaaagttaatatttctacatgaaatgtttagctcttacactctatccttcctagaaaatggtaattgagattactcagatattaattaaatacaatatcatatatatattcacagagtataaacctaaataatgatctattagattcaaatatttgaaataaaaacttgatttttttgt

SEQ ID NO: 426 - protein, 318 aa, Homo sapien
MDKQNSQMNASHPETNLPVGYPPQYPPTAFQGPPGYSGYPGPQVSYPPPPAGHSGPGPAGFPVPNQPVYNQPVYNQPVGAAGVPWMPAPQPPLNCPPGLEYLSQIDQILIHQQIELLEVLTGFETNNKYEIKNSFGQRVYFAAEDTDCCTRNCCGPSRPFTLRIIDNMGQEVITLERPLRCSSCCCPCCLQEIEIQAPPGVPIGYVIQTWHPCLPKFTIQNEKREDVLKISGPCVVCSCCGDVDFEIKSLDEQCVVGKISKHWTGILREAFTDADNFGIQFPLDLDVKMKAVMIGACFLIDFMFFESTGSQEQKSGVW

SEQ ID NO: 427 - DNA, 1085 bp, Homo sapien
gttttcttcgaagatttggggctccgcgatacagttaggatggctgtagtacctctgctgttgttggggggtttgtggagcgctgtgggagcgtccagcctgggtgtcgttacttgcggctccgtggtgaagctactcaatacgcgccacaacgtccgactgcactcacacgacgtgcgctatgggtcaagtagtgggcagcagtcagtgacaggtgtaacctctgtggatgacagcaacagttactggaggatacggcggaagagtgccacagtgtgtgagaggggaacccccatcaagtgtggccagcccatccggctgacacatgtcaacactggccgaaacctccatagtcaccacttcacttcacctctttctggaaaccaggaagtgactgcttttggtgaagaaggtgaaggtgattatctggatgactggacagtgctctgtaatggaccctactgggtgagagatggtgaggtgcggttcaaacactcttccactgaggtactgctgtctgtcacaggagaacaatatggtcgacctatcagtgggcaaaaagaggtgcatggcatggcccagccaagtcagaacaactactggaaagccatggaaggcatcttcatgaagcccagtgagttgttgaaggcagaagcccaccatgcagagctgtgaatcttgaggctctgaggcactgttaacgcacaatgttcacagacatctgttgctgcctcaccttgggatccctgccacaagttccttgggcagtggccatgtcaccattgagatgaagatatacaacagagaaatagtggctgtgtttgggaagcttcagccctgcacattttgaactagtcactctcccagacttggcggtgggtcagttctttcctgagtagaggacttgctggtaaaaggggcagatgctttttattagtactgattaaaccacactgagggaaacatccctcttagctgggaaactgtttactcttcaggagcttggcatcatggactgttaatgtatgtgattttccccctattttctctcccccacaatgataaaaacaataattttattatga

SEQ ID NO: 428 - protein, 211 aa, Homo sapien
MAVVPLLLLGGLWSAVGASSLGVVTCGSVVKLLNTRHNVRLHSHDVRYGSSSGQQSVTGVTSVDDSNSYWRIRRKSATVCERGTPIKCGQPIRLTHVNTGRNLHSHHFTSPLSGNQEVTAFGEEGEGDYLDDWTVLCNGPYWVRDGEVRFKHSSTEVLLSVTGEQYGRPISGQKEVHGMAQPSQNNYWKAMEGIFMKPSELLKAEAHHAEL

SEQ ID NO: 429 - DNA, 986 bp, Homo sapien
tgcgaacggcgagcagcggcggcggcgcggagagacgcagcggaggttttcctggtttcggaccccagcggccggatggtgaaatcctccctgcagcggatcctcaatagccactgcttcgccagagagaaggaaggggataaacccagcgccaccatccacgccagccgcaccatgccgctccttagcctgcacagccgcggcggcagcagcagtgagagttccagggtctccctccactgctgtagtaacccgggtccggggcctcggtggtgctcctgatgcccctcacccacccctgaagatcccaggtgggcgagggaatagtcagagggatcacaatctttcagctaacttattctactccgatgatcggctgaatgtaacagaggaactaacgtccaacgacaagacgaggattctcaacgtccagtccaggctcacagacgccaaacgcattaactggcgaacagtgctgagtggcggcagcctctacatcgagatcccgggcggcgcgctgcccgaggggagcaaggacagctttgcagttctcctggagttcgctgaggagcagctgcgagccgaccatgtcttcatttgcttccacaagaaccgcgaggacagagccgccttgctccgaaccttcagctttttgggctttgagattgtgagaccggggcatccccttgtccccaagagacccgacgcttgcttcatggcctacacgttcgagagagagtcttcgggagaggaggaggagtagggccgcctcggggctgggcatccggcccctggggccaccccttgtcagccgggtgggtaggaaccgtagactcgctcatctcgcctgggtttgtccgcatgttgtaatcgtgcaaataaacgctcactccgaattagcggtgtatttcttgaagtttaatattgtgtttgtgatactgaagtatttgctttaattctaaataaaaatttatattttacttttt

SEQ ID NO: 430 - protein, 228 aa, Homo sapien
MVKSSLQRILNSHCFAREKEGDKPSATIHASRTMPLLSLHSRGGSSSESSRVSLHCCSNPGPGPRWCSDAPHPPLKIPGGRGNSQRDHNLSANLFYSDDRLNVTEELTSNDKTRILNVQSRLTDAKRINWRTVLSGGSLYIEIPGGALPEGSKDSFAVLLEFAEEQLRADHVFICFHKNREDRAALLRTFSFLGFEIVRPGHPLVPKRPDACFMAYTFERESSGEEEE

SEQ ID NO: 431 - DNA, 2401 bp, Homo sapien
gattggaagcagaggaagctgaagaaaagtaatgtagtttccttaaaggcatacaaaggactggcagaagtcgctgtgaagagcttgtgtgagctgttggtggcactacctcattttaactttcacaacaacatcatcgtattgattgtccctctcatgaatgacatgtcaaaattgatatctgaaatgtgttgtgaagctgtgaagaaactctttaagcaagataaattaggccaagcttctcttggtgtaattaaagtgatttctggttttgtgaagggcagaaattacgaagttaggccagagatgttaaaaacatttttatgcctaagaatcaaggaagtagaagtgaaaaaagatacagaagacattaataaaccaaaaaaatttatgactttcaaagaaaagagaaaatctctatcaagaatgcagagaaagtggaagaaagcagaagagaaactagcgcgagagcttcgagaggcagaagcttcagagagtactgagaaaaaacttaaactgcacacagagactctgaatattgtgtttgtaacctacttcagaatattgaagaaggcccagaggtcacctctcctgccagcagttctagaaggtcttgccaagtttgctcaccttataaatgtggaattttttgatgatctgttagtagttcttcatactctcattgagtctggtgacctaagctatcaagaaagtcttcactgtgtccagactgcttttcatattctttctggacaaggtgatgttctgaatattgatccattgaaattctacacacatctctacaaaacactgttcaaattacatgcaggtgctaccaatgaaggtgttgagattgtactccagtgccttgatgtcatgctaactaagcgcagaaagcaagtttctcagcagcgagctcttgccttcatcaaacgcctttgtacccttgctcttcatgttcttccaaattcaagtattggcattttagcaactaccagaatattaatgcatactttccccaaaacagatctactgcttgacagtgaatctcagggaagtggagttttccttcctgaactggatgagcctgagtactgcaatgctcagaacactgctctgtgggaactgcatgctctgcggaggcattatcatcccatagtgcagagatttgcagcccacctgatcgctggagcaccttctgaaggctctggagcactcaaaccagagttgagtcgaagatctgctactgaactttttgaggcatatagcatggcagaaatgacattcaatcctcctgttgaatcttcaaaccccaaaataaagggtaaatttttacaaggggattcatttttgaatgaagatttaaatcagctaatcaaaagatactccagtgaagttgctactgaatcgcctctggatttcacgaaatatttgaaaacatcactacactagtagaggaatgaagtcagtggactttcttgtatatttgtgtgtgcagatgtacataaagatgagttgttaacttaggatcttttctttttatacaaggaaagcttcctaagaatgtctaggaagaagaggaagaatgaccctttgcatggcacagggttctgcccctattctgaatatgtcattccatcaaggagatcaaaagcctttttttctccccagtatttggaaattactttcttgatgatgctgccttttaaaagcttcacgtacattatagttttttaaaaaaatctttggactggatcttactgaagtgcagttgctatattaaaattagggcatagagcacagaaaaatcaagaccatgagaagacattttaccatttagctactttttataactaaatactctttaaatatttttatttcaatactgtggatggaaatgagaagcattctaaatttgagttaatatatttttatgaagatatttgagaaaagaaaaaaatagcttgtattcaggttcattggcttttgctggatgatccacctaaagaagttacctaatttggccttttaaaaaaggtgttagtgtttattatagctactttcaaggaaagtttgaatatgattctagtctctaaagttcttcacgttttctgacattccctggagggtgactggggaagaattgctccagggtagaagaaccaggcccaagactttaccattctgatctagagacaaaggatactcaatgaggagcttttttcccctcttggaacaggtaaaatgctttttcttattaatataattataaaacagtattttatgtaacagctattcccatattctaggagtggcctaagaaatgcgtgtttcagtgactagattataaatattctctattgtgaatagttgaataaaacagctgtttttttctgcttct

SEQ ID NO: 432 - protein, 431 aa, Homo sapien [sequence omitted]

SEQ ID NO: 433 - DNA, 1956 bp, Homo sapien
ggtggccctgagcgccggcgacacctttcctggactataaattgagcacctgggatgggtagggggccaacgcagtcaccgccgtccgcagtcacagtccagccactgaccgcagcagcgcccttgcgtagcagccgcttgcagcgagaacactgaattgccaacgagcaggagagtctcaaggcgcaagaggaggccagggctcgacccacagagcaccctcagccatcgcgagtttccgggcgccaaagccaggagaagccgcccatcccgcagggccggtctgccagcgagacgagagttggcgagggcggaggagtgccgggaatcccgccacaccggctatagccaggcccccagcgcgggccttggagagcgcgtgaaggcgggcatccccttgacccggccgaccatccccgtgcccctgcgtccctgcgctccaacgtccgcgcggccaccatgatgcaaatctgcgacacctacaaccagaagcactcgctctttaacgccatgaatcgcttcattggcgccgtgaacaacatggaccagacggtgatggtgcccagcttgctgcgcgacgtgcccctggctgaccccgggttagacaacgatgttggcgtggaggtaggcggcagtggcggctgcctggaggagcgcacgcccccagtccccgactcgggaagcgccaatggcagctttttcgcgccctctcgggacatgtacagccactacgtgcttctcaagtccatccgcaacgacatcgagtggggggtcctgcaccagccgcctccaccggctgggagcgaggagggcagtgcctggaagtccaaggacatcctggtggacctgggccacttggagggtgcggacgccggcgaagaagacctggaacagcagttccactaccacctgcgcgggctgcacactgtgctctcgaaactcacgcgcaaagccaacatcctcactaacagatacaagcaggagatcggcttcggcaattggggccactgaggcgtggcgcccgtggctgcccagcaccttcttcgacccatctcaccctctctcattcctcaaagctttttttttttttcctggctggggggcgggaagggcagactgcaaactggggggctgcgtacgtgcaggaggcgcggtggggctgcgtggaggagggggccacgtgtgagagagaagaaaatggtggccggagatgggagggcccaaggaacctcctgggagggggcctgcattctatgttggtgggaatgggactgggctgacgccctgcattcagcctgtgcctttcctggggtttcttttctgttcttttcggaggagagggcccgagaaggggccataccagggcgcggcgctgggttgccacacttgggaaagcagcccggagctgggtgctggggaaggcggggcgcgtagcctcccgccgccctgcggttgggccggtggaggcccaggcgttgctaggattgcatcagttttcctgtttgcactatttctttttgtaacattggccctgtgtgaagtatttcgaatctcctccttgctctgaaacttcagcgattccattgtgataagcgcacaaacagcactgtctgtcggtaatcggtactactttattaatgattttctgttacactgtatagtagtcctatggcacccccaccccatccctttcgtgccactcccgtccccacccccaccccagtgtgtataagctggcatttcgccagcttgtacgtagcttgccactcagtgaaaataataacattattatgagaaagtggacttaaccgaaatggaaccaactgacattctatcgtgttgtacatagaatgatgaagggttccactgttgttgtatgtcttaaatttatttaaaactttttttaatccagatgtagactatattctaaaaaataaaaaagcaaatgtgtcaact

SEQ ID NO: 434 - protein, 183 aa, Homo sapien
MMQICDTYNQKHSLFNAMNRFIGAVNNMDQTVMVPSLLRDVPLADPGLDNDVGVEVGGSGGCLEERTPPVPDSGSANGSFFAPSRDMYSHYVLLKSIRNDIEWGVLHQPPPPAGSEEGSAWKSKDILVDLGHLEGADAGEEDLEQQFHYHLRGLHTVLSKLTRKANILTNRYKQEIGFGNWGH

SEQ ID NO: 435 - DNA, 1383 bp, Homo sapien
ggcacgaggctccagcatggaggaggccaccggctgtgcagggttcaatctcatccacttggtggccacgggcatctcctgcttcttgggctctgggctcctgaccctagcagtgtacctgtcttgccagcactgccagcgtcagtcccaggagtccacactggtccatcctgccacccccaaccatttgcactacaagggcggaggcaccccgaagaatgaaaagtacacacccatggaattcaagaccctgaacaagaataacttgatccctgatgacagagccaacttctacccattgcagcagaccaatgtgtacacgactacttactacccaagccccctgaacaaacacagcttccggcccgaggcctcacctggacaacggtgcttccccaacagctgataccgccgtcctggggacttgggcttcttgccttcataaggcacagagcagatggagatgggacagtggagccagtttggttttctccctctgcactaggccaagaacttgctgccttgcctgtggggggtcccatccggcttcagagagctctggctggcattgaccatgggggaaagggctggtttcaggctgacatatggccgcaggtccagttcagcccaggtctctcatggttatcttccaacccactgtcacgctgacactatgctgccatgcctgggctgtggacctactgggcatttgaggaattggagaatggagatggcaagagggcaggcttttaagtttgggttggagacaacttcctgtggcccccacaagctgagtctggccttctccagctggccccaaaaaaggcctttgctacatcctgattatctctgaaagtaatcaatcaagtggctccagtagctctggattttctgccagggctgggccattgtggtgctgccccagtatgacatgggaccaaggccagcgcaggttatccacctctgcctggaagtctatactctacccagggcatccctctggtcagaggcagtgagtactgggaactggaggctgacctgtgcttagaagtcctttaatctgggctggtacaggcctcagccttgccctcaatgcacgaaaggtggcccaggagagaggatcaatgccataggaggcagaagtctggcctctgtgcctctatggagactatcttccagttgctgctcaacagagttgttggctgagacctgcttgggagtctctgctggcccttcatctgttcaggaacacacacacacacacactcacacacgcacacacaatcacaatttgctacagcaacaaaaaagacattgggctgtggcattattaattaaagatgatatccagtcaaaaaaaaaaaaaaaaaaaaaaaaaaaaaa

SEQ ID NO: 436 - protein, 129 aa, Homo sapien
MEEATGCAGFNLIHLVATGISCFLGSGLLTLAVYLSCQHCQRQSQESTLVHPATPNHLHYKGGGTPKNEKYTPMEFKTLNKNNLIPDDRANFYPLQQTNVYTTTYYPSPLNKHSFRPEASPGQRCFPNS

SEQ ID NO: 437 - DNA, 3444 bp, Homo sapien
  unsure 2396-2531: unknown base
gaaaaatgaaacgtctttgtggtccggggctgagacccacgaggagactgggcgggatttctggcgttaggaggcggggcctttcggctttgggcgcgagtggttaaaagacagttggtgtcggttcggcttctcgggtcggattccgcggtcccaacccttccccatggccgaccctgaggagttgcaggtttcttcgccgcccccgccgcctccctcttctccctcctcttcagacgcctctgcagcatcttccccgggcggcccagtgagtttgggctggccagttccgagcaggagcagcggcccaacggtggaccagctggaggaagtggagctgcagatcggagacgcagccttttcattaaccaaacttcttgaagccacatctgcagtatcagctcaagtggaagaacttgccttcaaatgtacagaaaatgcacgtttccttaaaacgtggcgggacctcttgaaagaaggctatgattctttgaaacctgatgactgatttggcatacttcgttgtttaataatgactgcaataattcatacttcttatgtcatattttgtacatgtaccacacatataggatgacctctgtccagcagttctgtatatactcagaatgaaatttttcttggttttcttggtttttgtgaaagcagaataccgatgctatttttgttgcggaccagtacttgtttgtccttaaatactttatgcctctgaactttcatagaatcctttatgaaagttaacttcatcaatagacggttaatattaatagagccacagtgctaccagtagcaaactaggtagaccattatttgttttgcaacaagatgctaagcatggcagactttgaagttgcgtttcatcttaaggaccaagggaggtaactttaaggttgccagtggtggatccagctccgttaggctaagttgtctacagctaatgattgtgtctttattctatatccccagcacctaaaacagggtcacacaacattcactaaatgtttgttgaataaaagagttaacaaacataattgaaagctttttttcttcctatatttagcatgaagactgtcattgtttctctaggaaatgtatgaatctgaacttttttgacttgaagaaaaacattctttttttacagagatttggactttgatgataggttttaaaaatatatgataaatattttttgtacttgtttgattttttttttaaagactttacttcagaaagggaaagactgtttagaaagaatgcatattttttccctatttatttctgtggttactgcttttgcagtttaacagtgtttgtatttgatatttgtatatgtttgattgctatctttaaagtgccttatcagatttatgggctctgtgctattactttttgagctttgcaagttgtgtacataataattctaaagaagttactttgtttgcaatgcatcaaatttaaatgatgtgattttttttgtattatttgatcttagtgacagtgttctattttgcatcctgtatcttatgttgcttttggtgttttgtgttgtgtgtcaacgattaagccaactaattctctaccatatataacttctggacatttttgatacaacatcttaattctttgtagatatggagataggtacagaactatattctaatgccccacaatggggctatgagaggggacagatggatgggcaaagaatagttttgtttaacatattaggtcatagttcttgattagtttttttagttaaagataaacacatagggtgtgatttctataccaaagatatgcttatttcagtattagaaaaatattcttcttacatctcctgaaaattgcaatttttaaaatgtgtaaaaataaattattattaaaagcacattttatttccatttgtttggattcattaccttaaaactttattgacatatttcaaagatataggaaaggtaaatgatttcaagaaaatccgtgtatttctaccatgcagatgtaataaatgttagcatttggctatattttcttcagacacacatatgcatgtaattgcaaatgttagatacatttgaagtttgctttgttacctgtttgatcctgtcccgttcctccctccccagagtccccagaggtaaccactagagggggcataatatagcatgtgtttttatatttttaatacaaatatattttttaaaagcgctacaaaatattgttttatatatgtggtagccagcttccagatggccccagtgatccctggcctcctggtgttcatgccccagtatagccttctcctgcattttacagtgctgacttttgtaactaccaggatattgagcaaatgcagtgtgtgatttctgaggccatannnnnnnnnnnnnnnnnnnnnnnnnnnnnnnnnnnnnnnnnnnnnnnnnnnnnnnnnnnnnnnnnnnnnnnnnnnnnnnnnnnnnnnnnnnnnnnnnnnnnnnnnnnnnnnnnnnnnnnnnnnnnnnnnnnnnnnnaagcactgggagtacaggcatttttgctcatttttctatgttgttttttttacttgtcagtttttagatattacatattttgaatactaatgatctgttatgtatgttccaattatcttttttagtctggtttgtcttcatattttggttatgaaatcttgaatttttaaaaacgtaattttaccaatctttcataatgatttgctttttctggtttttgtataggaaatgtcataaaaatagtcctattcagccttccaaaagttacaaaatttttggtttttaacatttagatgtttagtccaactggaaattggtttccttttatggcatgattttggaatcttgttttaattatttttacatatttatagctgttcctccaagtatcaatttttcaagtgcaacatctgtcatgcagttactatgtaagggccagattctgacctttctgttctttttatctgaaggaaatttgaacatgccacccccaaatatgccgatttggcatactgattatttcgagctaaaggtgcttgactaacagtagttgcagaaatggctattttaactgtcctttcctacctgtagcaagccatacaaacttctttgataaagatgctttcctgataccaagatgagaagatggctctaatcagctgagacagcaccagaggaatctacaaacaagaaactattagtttcttaacatatatttaccttccacagtttctgcctctggaagcctaaaactgctttccttcgtcttgtcacacttctctgaaatgtattctttgtggaagatgctatatagtccagagttgtaagccactacttgtgtttaccttttcattgagttttctcctgtgtgatgtacgttgcatatattaataaaattacttgtttttctctt

SEQ ID NO: 438 - protein, 34 aa, Homo sapien
KMKRLCGPGLRPTRRLGGISGVRRRGLSALGASG

SEQ ID NO: 439 - DNA, 1820 bp, Homo sapien
acagagatggcactgatgcaggaactgtatagcacaccagcctccaggctggactccttcgtggctcagtggctgcagccccaccgggagtggaaggaagaggtgctagacgctgtgcggaccgtggaggagtttctgaggcaggagcatttccaggggaagcgtgggctggaccaggatgtgcgggtgctgaaggtagtcaaggtgggctccttcgggaatggcacggttctcaggagcaccagagaggtggagctggtggcgtttctgagctgtttccacagcttccaggaggcagccaagcatcacaaagatgttctgaggctgatatggaaaaccatgtggcaaagccaggacctgctggacctcgggctcgaggacctgaggatggagcagagagtccccgatgctcttgtcttcaccatccagaccagggggactgcggagcccatcacggtcaccattgtgcctgcctacagagccctggggccttctcttcccaactcccagccaccccctgaggtctatgtgagcctgatcaaggcctgcggtggtcctggaaatttctgcccatccttcagcgagctgcagagaaatttcgtgaaacatcggccaactaagctgaagagcctcctgcgcctggtgaaacactggtaccagcagtatgtgaaagccaggtcccccagagccaatctgccccctctctatgctcttgaacttctaaccatctatgcctgggaaatgggtactgaagaagacgagaatttcatgttggacgaaggcttcaccactgtgatggacctgctcctggagtatgaagtcatctgtatctactggaccaagtactacacactccacaatgcaatcattgaggattgtgtcagaaaacagctcaaaaaagagaggcccatcatcctggatccggccgaccccaccctcaacgtggcagaagggtacagatgggacatcgttgctcagagggcctcccagtgcctgaaacaggactgttgctatgacaacagggagaaccccatctccagctggaacgtgaagagggcacgagacatccacttgacagtggagcagaggggttacccagatttcaacctcatcgtgaacccttatgagcccataaggaaggttaaagagaaaatccggaggaccaggggctactctggcctgcagcgtctgtccttccaggttcctggcagtgagaggcagcttctcagcagcaggtgctccttagccaaatatgggatcttctcccacactcacatctatctgctggagaccatcccctccgagatccaggtcttcgtgaagaatcctgatggtgggagctacgcctatgccatcaaccccaacagcttcatcctgggtctgaagcagcagattgaagaccagcaggggcttcctaaaaagcagcagcagctggaattccaaggccaagtcctgcaggactggttgggtctggggatctatggcatccaagacagtgacactctcatcctctcgaagaagaaaggagaggctctgtttccagccagttagttttctctgggagacttctctgtacatttctgccatgtactccagaactcatcctgtcaatcactctgtcccattgtctactgggaaggtcccaggtcttcaccagttttacaatgagttatcccaggccagacgtggtagctcacacctgtaatcccagaactttgggaggccgaggtgggaggagcgcttgagccgaggagttcaagaccagcctgggtatcatagggagaccccgtctctacaaaataaaaaaataattcactggg

SEQ ID NO: 440 - protein, 514 aa, Homo sapien
MALMQELYSTPASRLDSFVAQWLQPHREWKEEVLDAVRTVEEFLRQEHFQGKRGLDQDVRVLKVVKVGSFGNGTVLRSTREVELVAFLSCFHSFQEAAKHHKDVLRLIWKTMWQSQDLLDLGLEDLRMEQRVPDALVFTIQTRGTAEPITVTIVPAYRALGPSLPNSQPPPEVYVSLIKACGGPGNFCPSFSELQRNFVKHRPTKLKSLLRLVKHWYQQYVKARSPRANLPPLYALELLTIYAWEMGTEEDENFMLDEGFTTVMDLLLEYEVICIYWTKYYTLHNAIIEDCVRKQLKKERPIILDPADPTLNVAEGYRWDIVAQRASQCLKQDCCYDNRENPISSWNVKRARDIHLTVEQRGYPDFNLIVNPYEPIRKVKEKIRRTRGYSGLQRLSFQVPGSERQLLSSRCSLAKYGIFSHTHIYLLETIPSEIQVFVKNPDGGSYAYAINPNSFILGLKQQIEDQQGLPKKQQQLEFQGQVLQDWLGLGIYGIQDSDTLILSKKKGEALFPAS

SEQ ID NO: 441 - DNA, 1807 bp, Homo sapien
ctttccgtccccttgcttcgtcttcgcttttctttctacttattcttatctgtgtctttcgctttgtttgcctctccgtctgttttccctcagggcccccttctttcctcgaccttttcaaatcgcaaatatggcgccggagcggctgcggagccgggcgccctccgccttcaagttgcggggcttgctgctccgtggtgaagctattaagtacctcacagaagctcttcagtctatcagtgaattagagcttgaagataaactggaaaagataattaatgcagttgagaagcaacccttgtcatcaaacatgattgaacgatctgtggtggaagcagcagtccaggaatgcagtcagtctgttgatgaaactatagagcacgttttcaatatcataggagcatttgatattccacgctttgtgtacaattcagaaagaaaaaaatttcttcctctgttaatgaccaaccaccctgcaccaaatttatttggaacaccaagagataaagcagagatgtttcgtgagcgatataccattttgcaccagaggacccacaggcatgaattatttactcctccggtgataggttctcaccctgatgaaagcggaagcaaattccagcttaaaacaatagaaaccttattgggtagtacaaccaaaatcggagatgcgattgttcttggaatgataacgcagttaaaagagggaaaattttttctggaagatcctactggaacagtccaactagaccttagtaaagctcagttccatagtggtttatacacagaggcatgctttgtcttagcagaaggttggtttgaagatcaagtgtttcatgtcaatgcctttggatttccacccactgagccctctagtactactagggcatactatggaaatattaatttttttggaggtccttctaatacatctgtgaagacttctgcaaaactaaaacagctagaagaggagaataaagatgctatgtttgtgtttttatctgatgtttggttggaccaggtggaagtattggaaaaacttcgcataatgtttgctggttattcaccagcacctccaacctgctttattctgtgtggtaatttttcatctgcaccatatggaaaaaatcaagttcaagctttgaaagattccctaaaaactttggcagatataatatgtgaatacccagatattcaccaaagtcgttttgtgtttgtacctggtccagaggatcctggatttggttccatcttaccaaggccaccacttgctgaaagcatcactaatgaattcagacaaagggtaccattttcagtttttactactaatccttgcagaattcagtactgtacacaggaaattactgtcttccgtgaagacttagtaaataaaatgtgcagaaactgcgtccgttttcctagcagcaatttggctattcctaatcactttgtaaagactatcttatcccaaggacatctgactcccctacctctttatgtctgcccagtgtattgggcatatgactatgctttgagagtgtatcctgtgcccgatctacttgtcattgcagacaaatatgatcctttcactacgacaaataccgaatgcctctgcataaaccctggctcttttccaagaagtggattttcattcaaagttttttatccttctaataagacagtagaagatagcaaacttcaaggcttttgagattcttaaagatcatctgaagaaaattcatcagttttctgcttaactctatatcttatgtgattctgatattacaataaaattatggtaaacttt

SEQ ID NO: 442 - protein, 526 aa, Homo sapien
MAPERLRSRAPSAFKLRGLLLRGEAIKYLTEALQSISELELEDKLEKIINAVEKQPLSSNMIERSVVEAAVQECSQSVDETIEHVFNIIGAFDIPRFVYNSERKKFLPLLMTNHPAPNLFGTPRDKAEMFRERYTILHQRTHRHELFTPPVIGSHPDESGSKFQLKTIETLLGSTTKIGDAIVLGMITQLKEGKFFLEDPTGTVQLDLSKAQFHSGLYTEACFVLAEGWFEDQVFHVNAFGFPPTEPSSTTRAYYGNINFFGGPSNTSVKTSAKLKQLEEENKDAMFVFLSDVWLDQVEVLEKLRIMFAGYSPAPPTCFILCGNFSSAPYGKNQVQALKDSLKTLADIICEYPDIHQSRFVFVPGPEDPGFGSILPRPPLAESITNEFRQRVPFSVFTTNPCRIQYCTQEITVFREDLVNKMCRNCVRFPSSNLAIPNHFVKTILSQGHLTPLPLYVCPVYWAYDYALRVYPVPDLLVIADKYDPFTTTNTECLCINPGSFPRSGFSFKVFYPSNKTVEDSKLQGF

SEQ ID NO: 443 - DNA, 1225 bp, Homo sapien
gcggctctctgatccagcccgggagaggaccgagctggaggagctgggtgtggggtgcgttgggctggtggggaggcctagtttgggtgcaagtaggtctgattgagcttgtgttgtgctgaagggacagccctgggtctaggggagagagtccctgagtgtgagacccgccttccccggtcccagcccctcccagttcccccagggacggccacttcctggtccccgacgcaaccatggctgaagaacaaccgcaggtcgaattgttcgtgaaggctggcagtgatggggccaagattgggaactgcccattctcccagagactgttcatggtactgtggctcaagggagtcaccttcaatgttaccaccgttgacaccaaaaggcggaccgagacagtgcagaagctgtgcccaggggggcagctcccattcctgctgtatggcactgaagtgcacacagacaccaacaagattgaggaatttctggaggcagtgctgtgccctcccaggtaccccaagctggcagctctgaaccctgagtccaacacagctgggctggacatatttgccaaattttctgcctacatcaagaattcaaacccagcactcaatgacaatctggagaagggactcctgaaagccctgaaggttttagacaattacttaacatcccccctcccagaagaagtggatgaaaccagtgctgaagatgaaggtgtctctcagaggaagtttttggatggcaacgagctcaccctggctgactgcaacctgttgccaaagttacacatagtacaggtggtgtgtaagaagtaccggggattcaccatccccgaggccttccggggagtgcatcggtacttgagcaatgcctacgcccgggaagaattcgcttccacctgtccagatgatgaggagatcgagctcgcctatgagcaagtggcaaaggccctcaaataagcccctcctgggactccctcaaccccctccattttctccacaaaggccctggtggtttccacattgctacccaatggacacactccaaaatggccagtgggcagggaatcctggagcacttgttccgggatggtgtggtggaagaggggatgagggaaagaaatggggggcctgggtcagatttttattgtggggtggggtgagtaggacaacatatttcagtaataaaatacagaataaaaatcaagtgtttttaaaaaaaa

SEQ ID NO: 444 - protein, 241 aa, Homo sapien
MAEEQPQVELFVKAGSDGAKIGNCPFSQRLFMVLWLKGVTFNVTTVDTKRRTETVQKLCPGGQLPFLLYGTEVHTDTNKIEEFLEAVLCPPRYPKLAALNPESNTAGLDIFAKFSAYIKNSNPALNDNLEKGLLKALKVLDNYLTSPLPEEVDETSAEDEGVSQRKFLDGNELTLADCNLLPKLHIVQVVCKKYRGFTIPEAFRGVHRYLSNAYAREEFASTCPDDEEIELAYEQVAKALK

SEQ ID NO: 445 - DNA, 2360 bp, Homo sapien
gatatcaattccgccgggaactggaggaaggagaccctggcttcgcaggggccccggctggggcagaggcgaggggcctgggggggcgctggctttggccccgcctggggcaggatggtgaatctggagtccatgcacacagatatcaagatgagtggggatgtagccgattccacggatgctcgcagcactctcagccaggtggagccaggaaatgatcgaaatggcctagatttcaacaggcagattaaaaccgaagatctcagtgactccctgcagcagaccctctcccatcggccatgccacctgagtcaaggacctgccatgatgtccggaaaccaaatgtctgggctaaatgccagcccatgtcaggacatggcttccctccatccgctccagcagcttgtgctggttcccggccacttacagtctgtatcccagttcctgctatctcagacccagcctgggcagcaaggtctgcagccaaatctcctcccctttccacagcaacaaagcggtctcctcctcccacagactgggccgggactggcatcccaggcatttgggcgccctgggctgccaggatcctctttagaaccccacctggaagcatcccagcatctcccagtgcccaagcatctacccagctctggaggggccgatgagcccagtgacctcgaggagctggagaagtttgccaagaccttcaagcagaggcgcattaagctgggcttcacacagggagatgtggggctggcgatgggaaagctgtatggcaacgacttcagccagaccaccatctcacgatttgaggccctcaacctgagcttcaagaacatgtgcaagctcaagcccctgctggagaagtggctgaatgatgcagagtcctctccgtcagacccctcagtgagcacgcccagctcctaccccagcctcagtgaagtatttggtaggaagagaaagaaacggaccagcatcgagaccaacatccgcctgactctggagaagaggtttcaagataacccaaaacccagctcggaggagatctccatgattgcagagcagttgtccatggagaaggaggtggtgagggtctggttctgcaaccgacgccaaaaggagaagcgaatcaactgccctgtggccacacccatcaaaccacctgactacaactcccggctggtatctccctcagggtctctgggccccctctctgtccctcctgtccacagtaccatgcctggaacagtaacgtcatcctgttcccctgggaacaacagcaggccttcatctcctggctcaggactccacgccagcagccccactgcatctcaaaataactccaaagcagcagtgaactccgcctccagttttaactcttcaggatcttggtaccgatggaatcattccacctacctccactgagaccaaaaagtttctcctactccagctggccctgtattccccctggaaggaagggaatcatgccttctatatacagacagattgccttcagaagagtggaagaaaatctccactatcaatgaacccagactcttgtcttcttcaagagcaagggcctccggagatccaaactgtgattgaaccaagtgcagactcctaatgctcttgaaatacacagcccctcctaggagcttaccattttcaccttccttgcctatgcccttgccttctagttccaaatattttagccagcttcactgtggcaatagtctttcagagaaaagacttcttgctgttattctccaactcatccgtgggcttctggggacagccatttggctggggtgccaaacaccagaaggggagataatagttttgactctgaacttggccacaacccctgaactgatcccaaaatctgtgaaaagatttgaatctgatatctccaccaaagccttgatgttttctctgtacagctaagttttctgatggaatcttcatctcaccccattttctttttaacctcgcccccttttctacaatcaaatccattcattattgcgccctccaggtcccctcctttttgcagaaggtgtaaaagagctgcccttggtgggtgccctgggcatgttgcaacgcctgctggtgcccttctgtctgtccacgtctgcctagggctcaggagtgcttgttctttcccttcctccctgtgtttctctttatcctgtcccctctcctttctcctggcagcagaaaaggaagaacacaagagcaaacacacaacaatgatggtggcaaagtacctgtatatagccctttcccattttttgcattatgttcttaactccttaatgtggaattttccagcgaaatgtttaactcaggtgtgatttttg

SEQ ID NO: 446 - protein, 436 aa, Homo sapien [sequence omitted]

SEQ ID NO: 447 - DNA, 1742 bp, Homo sapien
caggaaggattcagacaactctgcctgggagtgagggctctgctcagcggcctagacctgggcacaacggagcaggccactccgtttctcatcacagacctgaaggcagatggcctgggcgtcgggcttcctctgctctctggcggggcgattttcacggtcaccaggctgcggacaggctgtgggggtggcgggcggtccaaagccaccgcttcacgtaggccaggggagccttggagaaatcaggcctgatgttgctcagcagcggcagcctgttgggaaagcacctccaggcctcggggaccatctctctcaggacgcggatgcgggcggggaccatctctctctggatgcagatgcgggtgtagtcccagctgggaggagtggtgcggaggggccggatgcggacccagtgcttcctgtggaagtaggtgaccttgcagttctcctggacctgggagctgaggaagggcctggactgcagaacccagtgcttttgggcggggcgcagctttctggcaagcggcttgggccttccagtagacactgggctgccagaagtttccgaaatctgcggtcaaggccagagatcaaatgtcagggctcagtgactagcgacggttggcatcaaaatgttggaaagtgcacaaggcgccgtgtgccaggtacggtctgtccaccaactgttgcatggggcaggaggccacggccaggccacagctttgccgcgcgcagctgcagaaggggcaagtagcgccccatgctgtctggaggaccaaggaggctcaagcctgtccttcccactcatggtcccagacacttagctctgggcagaggggcctggcagctgtctctgcttttgtacctgacctttaaaggcagaacatagaagaatttctgccaggtcctgaaaactgcagatacctgttgacagaagggtgctctctttgatcagtgtgaaaatgatcacaatacacttggaggctcttttaaggaaaaacaaatcatttgctcatattcgtctaggatgactgttaatatcactttttgcaattttgctcttaagaaaacggtgaaagccatcaggatttatgttttagtacctgtaatgctgattttatgttgaccctcataattttcagtgttcacacagccatatatacataatcttctctaaacactaatgccatttctgtcctttcatttctattggtaatcctggagtagagtgaggcacattttccactaatagctgaaaagatctaacttcaaaaacaaagaatccaaaggctgcttagtaactgtagtgcctaagtttagagtctgttcaaggtggtgtgaaaagttttttggggggggggcatttccctcaaaagcacgtggagaaggaacctattgaccctctggaatgccagaatcgggaagagacaaaaaagtcgcaaccaattgaagattgggcaatagatttggcccagactgaggcagatgggtgaatagtaaaaacaataatttggaaaaacccatgaaggtaactaacggaaggaaaaactaagagaatgaaaagtatttgcctctggaaagaacaactggcaggactgttgttttcattgtaagacttttggagccatttaattgtacttaaccattttcatctatttctttaataagaacaattccatcttaataaagagttacacttgttaataaaaaaaaaaaaaaaaaaaaaaaaaaaaaaaaaagcg

SEQ ID NO: 448 - protein, 214 aa, Homo sapien
MAWASGFLCSLAGRFSRSPGCGQAVGVAGGPKPPLHVGQGSLGEIRPDVAQQRQPVGKAPPGLGDHLSQDADAGGDHLSLDADAGVVPAGRSGAEGPDADPVLPVEVGDLAVLLDLGAEEGPGLQNPVLLGGAQLSGKRLGPSSRHWAARSFRNLRSRPEIKCQGSVTSDGWHQNVGKCTRRRVPGTVCPPTVAWGRRPRPGHSFAARSCRRGK

SEQ ID NO: 449 - DNA, 2498 bp, Homo sapien
accaccccagtgaaacccacagaaccatgtacaccctctaagtcccgaagtgccagctcagaggaggcctcagagtcacctacagcccggcagatccccccagaggcacgtcggctcatagtgaacaaaaatgctggtgagaccctcctgcagagggcggcgcgtcttggctataaggatgttgttctctactgcctccagaaagacagtgaagatgtgaatcaccgtgacaatgctggctacacagccctgcatgaggcttgttcccggggctggaccgacatcctgaacatcctgctggagcacggggccaacgtgaactgcagtgcgcaggacggcacgaggccagttcatgatgcggtggtcaatgacaacctggagaccatctggctcctgctgtcctatggggccgatcccacactggctacctactcgggtcagacagccatgaagctggccagcagcgacaccatgaagcgctttctcagtgatcacctctcggatcttcagggccgggcagagggtgatcccggtgtatcctgggatttttacagcagttctgtgttggaggaaaaagacgggtttgcctgtgacctcctacataatcctcctgggagctcagatcaagaaggagacgatccgatggaggaggatgatttcatgtttgaactctcagacaagcctcttctcccttgctacaacctccaagtgtcagtgtcccgcgggccctgcaactggttcctcttttccgatgtcttgaagaggctgaagctttcctcgaggatctttcaggcccggttcccgcactttgaaatcaccaccatgcccaaggccgagttctacaggcaggtggcctccagtcagctgctgacccctgccgagaggcctggaggcttggacgacagatcccccccaggctcctctgagactgtggagctggtgcggtacgagccagacctacttcggctcctagggtccgaggtggaattccagtcttgcaacagttgaccgggaaaacagcccctcctcttctttctccttccgagttcgcccttcccccacctccttgtctttccccgaccgagcaccagactgcagaatgaggcaataatacggaccaacaagaagccgccttatcaatgccagcattagcgactggactgtttttgtttttttggttacaattagttctcatctccctgtcgtcgtcattgttatcgtggttgctgatgggggtggaaagttgaactccatgtctgaggacaagaggtcccgggggtggtgggaggtggcgccggggtcccttggactggcctccttgttcatgaccaagaccaaacctgggccctggatggccttggcctgtcccgaggagaaatgagaaaatcccagatctctgagcgccccccaactccattcccctgtgttcttctgtcttctgtagtatttattttattagtatttaatttgtattgtttcattggtttctgataagtctgtatcactgtgacgatttgagacaacttgttgtattgagggactttctgtacctccttttctttttctttgttgatgagctctgacaaagctattccctggtgtttttttcccccactggggagggggtgaggtggaatggggtgggggaacatggacttgtgactaacgaagctggttgctgctggcccagggctgggggcttgggggtaaatcctgaggctttggtgctcccccacccacccattcccgccctttgcagcagccccgctatcttgagattagtgttgacagggaggggaggattgtgaggtgaggggttaataagttactctaataaaggagcgtggagaagggatctgaggggtgagggtggcccccctcctcacgccttcttcactgcccccctcagagtgcacaatacgagtttgttcctgcctccactctcccaccccgttctggcctccctgtctcaagatactgagcctctcacctcccagccctcagccacccccatccctgccccttctgagactcacagcacccctttccttcctctcctcccacctcctccctcagcccctcattctccttgggaatctgcagagggctctgggactcactgccggatgtgaaatccaggcgtcagctgtttgctaggcaagggcaggaaagtggtctccagcccttgctccactcatgcctgggggcctggggctgagtggtatccctacctggcctccccctggcctctgggcctccagcgctgggtttgtcgagtgagagagagagaggagcttgggttgcttccctgtccccgccccctctgtggcattgtccctcccactcttatttttctaccaattgctatttttccgaacaatccttgtagagtatgtaccatccaaaggcaggagggcctcgccgtggccggctctggttggagatggtacagttttattgtacaggtgctaaaacaacaacaacaaaaaagaaaatgg

SEQ ID NO: 450 - protein, 186 aa, Homo sapien
MKLASSDTMKRFLSDHLSDLQGRAEGDPGVSWDFYSSSVLEEKDGFACDLLHNPPGSSDQEGDDPMEEDDFMFELSDKPLLPCYNLQVSVSRGPCNWFLFSDVLKRLKLSSRIFQARFPHFEITTMPKAEFYRQVASSQLLTPAERPGGLDDRSPPGSSETVELVRYEPDLLRLLGSEVEFQSCNS

SEQ ID NO: 451 - DNA, 2207 bp, Homo sapien
atcgaataggagccatccgagacaacctgagtgaaacggccagcaccatggcactagctggagccagtataacggggagtctgtcaggaagtgccatggtaaactgttttaacaggttggaagtacaagcagatgtacagaaagaacggtacagtctaagtggagaatctggcacagtcagcttgggaacagttagtgataatgccagcaccaaagcaatggcaggatccattctgaattcctacatcccattggacaaagaaggcaacagtatggaggtgcaagtagatattgagtcaaagccatccaaattcaggcacaacagtggaagcagtagtgtggatgatggcagtgccacccgaagtcatgctggcggttcatccagtggcttgcctgaaggtaaatctagtgccaccaagtggtccaaagaagcaacagcagggaaaaaatcaaaaagtggtaaactgaggaaaaagggtaacatgaagataaatgagacgagagaggacatggatgcacagttgttagaacaacaaagcacgaactcaagtgaatttgaggctccatccctcagtgacagtatgccttctgtagcagattctcactctagtcatttttctgaatttagttgttctgacctagaaagcatgaaaacttcttgtagtcatggttccagtgattatcacacccgctttgctactgttaacattcttcctgaggtagaaaatgaccgtctggaaaattccccacatcagtgtagcatttctgtggttacccaaactgcttcctgttcagaagtttcacagttgaatcatattgctgaagaacatggtaacaatggaataaaacctaatgttgatttatattttggcgatgcactaaaagaaacaaataacaaccactcacatcagacaatggaattaaaagttgcaattcagactgaaatttaggcccataaatgctgcagaataattaccactgtacaaccgtgtttggagctggttgaactacatgtgactacttaagtttcaggttaccagcaaaagccgggtttcattatcataatgcagatacattttctgtgttcagcaaggcattgtgtgtcatgtggatcttagttaccaaactatgaagtgaaggctttaaaagtgcattattttaaggataataaatttgaagagcaaagcatgttttgtgtgtttgccacaaaacattgcttgaagcacatacttagatagaaattggtcttaatttatataatcaatataaaatactaatgcaattctacagcattcaaatgaagaaaacttgaggctttagggataagtggttagtgatattttattgaaaccactaaagagataagtttaaaagaactgcataggttactctcagtatatgatactctgtaacatttctatttatatcggcataaatttcattttttttcttcatatgcaatgtggttatataaagcttaatgcagctcatttgctaccatttggatacttagacactttgagcaagattgtggcagtttttgcacaactttgaaatagaaatacctggtactctatcttgtttattgttgatgccatcttagaggaaaaaatgtaaaggtaagtaattaagcatatgacagcaacaaataagatacataaaactacaaaataaagtcccattaggttataagtattacaaaaaatccacctttctctaaggggaagtttgtaccccattgattcttggtgcctttgggatcgactgggttttaatggcctagttatttgaggattttgctgtgttgttttccatgtcttctctggtcaccttggattatatataaaaatacaggaaatagataaacatgaatgtgattaataatgctgaaaaagtattagcctaccaaagacacactcaggctttagtgaataactttacataacctcagtttttaacacatgcatatcttctccaaccatgaaatcaaagcacggtgcagaacttgtaccaagtacaaaaggtccatgtatgattagcattattttcttttgcttttgtttatggacaatgttcagctgacataagcagaagttggccaaaatactgcctgtactgttaatttcctgtataattcacttaaataaaagcaggttaacctcaatgatagcagttaaaatgttctatcttatgtatttcttttaagt

SEQ ID NO: 452 - protein, 315 aa, Homo sapien
RIGAIRDNLSETASTMALAGASITGSLSGSAMVNCFNRLEVQADVQKERYSLSGESGTVSLGTVSDNASTKAMAGSILNSYIPLDKEGNSMEVQVDIESKPSKFRHNSGSSSVDDGSATRSHAGGSSSGLPEGKSSATKWSKEATAGKKSKSGKLRKKGNMKINETREDMDAQLLEQQSTNSSEFEAPSLSDSMPSVADSHSSHFSEFSCSDLESMKTSCSHGSSDYHTRFATVNILPEVENDRLENSPHQCSISVVTQTASCSEVSQLNHIAEEHGNNGIKPNVDLYFGDALKETNNNHSHQTMELKVAIQTEI

SEQ ID NO: 453 - DNA, 1158 bp, Homo sapien
cacgaggccgcgggggcaaggcctggagctgtggttcgaatttgtgcaggcagcgggtgctggcttttagggtccgccgcctctctgcctaatgagctgcaccagaatgatccaggttttagatccacgtcctttgacaagttcggtcatgcccgtggatgtggccatgaggctttgcttggcacattcaccacctgtgaagagtttcctgggcccgtacgatgaatttcaacgacgacattttgtgaataaattaaagcccctgaaatcatgtctcaatataaaacacaaagccaaatcacagaatgactggaagtgctcacacaaccaagccaagaagcgcgttgtgtttgctgactccaagggcctctctctcactgcgatccatgtcttctccgacctcccagaagaaccagcgtgggatctgcagtttgatctcttggaccttaatgatatctcctctgccttaaaacaccacgaggagaaaaacttgattttagatttccctcaaccttcaaccgattacttaagtttccggagccactttcagaagaactttgtctgtctggagaactgctcattgcaagagcgaacagtgacagggactgttaaagtcaaaaatgtgagttttgagaagaaagttcagatccgtatcactttcgattcttggaaaaactacactgacgtagactgtgtctatatgaaaaatgtgtatggtggcacagatagtgataccttctcatttgccattgacttaccccctgtcattccaactgagcagaaaattgagttctgcatttcttaccatgctaatgggcaagtcttttgggacaacaatgatggtcagaattatagaattgttcatgttcaatggaagcctgatggggtgcagacacagatggcaccccaggactgtgcattccaccagacgtctcctaagacagagttagagtcaacaatctttggcagtccgaggctggctagtgggctcttcccagagtggcagagctgggggagaatggagaacttggcctcttatcgatgaattaagcaacaatgtaactggtcttgacttgtcatattcccccatgcaatcctaggtctgtattgctcaattttaggaagcctttgctactccatcagtaggtttagatttga

SEQ ID NO: 454 - protein, 317 aa, Homo sapien
MSCTRMIQVLDPRPLTSSVMPVDVAMRLCLAHSPPVKSFLGPYDEFQRRHFVNKLKPLKSCLNIKHKAKSQNDWKCSHNQAKKRVVFADSKGLSLTAIHVFSDLPEEPAWDLQFDLLDLNDISSALKHHEEKNLILDFPQPSTDYLSFRSHFQKNFVCLENCSLQERTVTGTVKVKNVSFEKKVQIRITFDSWKNYTDVDCVYMKNVYGGTDSDTFSFAIDLPPVIPTEQKIEFCISYHANGQVFWDNNDGQNYRIVHVQWKPDGVQTQMAPQDCAFHQTSPKTELESTIFGSPRLASGLFPEWQSWGRMENLASYR

SEQ ID NO: 455 - DNA, 3828 bp, Homo sapien
cgactccttagagcatggcatggctcagaggtgctggtaaaactgatgggggtttttgctgtccctcccctcagcgccgacaccatgtggatccaggttcggaccatggacgggaggcagacccacacggtggactcgctgtccaggctgaccaaggtggaggagctgaggcggaagatccaggagctgttccacgtggagccaggcctgcagaggctgttctacaggggcaaacagatggaggacggccataccctcttcgactacgaggtccgcctgaatgacaccatccagctcctggtccgccagagcctcgtgctcccccacagcaccaaggagcgggactccgagctctccgacaccgactccggctgctgcctgggccagagtgagtcagacaagtcctccacccacggcgaggcggccgccgagactgacagcaggccagccgatgaggacatgtgggatgagacggaattggggctgtacaaggtcaatgagtacgtcgatgctcgggacacgaacatgggggcgtggtttgaggcgcaggtggtcagggtgacgcggaaggccccctcccgggacgagccctgcagctccacgtccaggccggcgctggaggaggacgtcatttaccacgtgaaatacgacgactacccggagaacggcgtggtccagatgaactccagggacgtccgagcgcgcgcccgcaccatcatcaagtggcaggacctggaggtgggccaggtggtcatgctcaactacaaccccgacaaccccaaggagcggggcttctggtacgacgcggagatctccaggaagcgcgagaccaggacggcgcgggaactctacgccaacgtggtgctgggggatgattctctgaacgactgtcggatcatcttcgtggacgaagtcttcaagattgagcggccgggtgaagggagccccatggttgacaaccccatgagacggaagagcgggccgtcctgcaagcactgcaaggacgacgtgaacagactctgccgggtctgcgcctgccacctgtgcgggggccggcaggaccccgacaagcagctcatgtgcgatgagtgcgacatggccttccacatctactgcctggacccgcccctcagcagtgttcccagcgaggacgagtggtactgccctgagtgccggaatgatgccagcgaggtggtactggcgggagagcggctgagagagagcaagaagaaggcgaagatggcctcggccacatcgtcctcacagcgggactggggcaagggcatggcctgtgtgggccgcaccaaggaatgtaccatcgtcccgtccaaccactacggacccatcccggggatccccgtgggcaccatgtggcggttccgagtccaggtcagcgagtcgggtgtccatcggccccacgtggctggcatacacggccggagcaacgacggagcgtactccctagtcctggcggggggctatgaggatgacgtggaccatgggaattttttcacatacacgggtagtggtggtcgagatctttccggcaacaagaggaccgcggaacagtcttgtgatcagaaactcaccaacaccaacagggcgctggctctcaactgctttgctcccatcaatgaccaagaaggggccgaggccaaggactggcggtcggggaagccggtcagggtggtgcgcaatgtcaagggtggcaagaatagcaagtacgcccccgctgagggcaaccgctacgatggcatctacaaggttgtgaaatactggcccgagaaggggaagtccgggtttctcgtgtggcgctaccttctgcggagggacgatgatgagcctggcccttggacgaaggaggggaaggaccggatcaagaagctggggctgaccatgcagtatccagaaggctacctggaagccctggccaaccgagagcgagagaaggagaacagcaagagggaggaggaggagcagcaggaggggggcttcgcgtcccccaggacgggcaagggcaagtggaagcggaagtcggcaggaggtggcccgagcagggccgggtccccgcgccggacatccaagaaaaccaaggtggagccctacagtctcacggcccagcagagcagcctcatcagagaggacaagagcaacgccaagctgtggaatgaggtcctggcgtcactcaaggaccggccggcgagcggcagcccgttccagttgttcctgagtaaagtggaggagacgttccagtgtatctgctgtcaggagctggtgttccggcccatcacgaccgtgtgccagcacaacgtgtgcaaggactgcctggacagatcctttcgggcacaggtgttcagctgccctgcctgccgctacgacctgggccgcagctatgccatgcaggtgaaccagcctctgcagaccgtcctcaaccagctcttccccggctacggcaatggccggtgatctccaagcacttctcgacaggcgttttgctgaaaacgtgtcggagggctcgttcatcggcactgattttgttcttagtgggcttaacttaaacaggtagtgtttcctccgttccctaaaaaggtttgtcttcctttttttttatttttatttttcaaatctatacattttcaggaatttatgtattctggctaaaagttggacttctcagtattgtgtttagttctttgaaaacataaaagcctgcaatttctcgacaaaacaacacaagattttttaaagatggaatcagaaactacgtggtgtggaggctgttgatgtttctggtgtcaagttctcagaagttgctgccaccaactctttaagaaggcgacaggatcagtccttctctagggttctggcccccaaggtcagagcaagcatcttcctgacagcattttgtcatctaaagtccagtgacatggttccccgtggtggcccgtggcagcccgtggcatggcgtggctcagctgtctgttgaagttgttgcaaggaaaagaggaaacatctcgggcctagttcaaacctttgcctcaaagccatcccccaccagactgcttagcgtctgagatccgcgtgaaaagtcctctgcccacgagagcagggagttggggccacgcagaaatggcctcaaggggactctgctccacgtggggccaggcgtgtgactgacgctgtccgacgaaggcggccacggacggacgccagcacacgaagtcacgtgcaagtgcctttgattcgttccttctttctaaagacgacagtctttgttgttagcactgaattattgaaaatgtcaaccagattctagaaactgcggtcatccagttcttcctgacaccggatgggtgcttgggaaccgtttgagccttatagatcatttacattcaatttttttaactcagcaagtgagaacttacaagagggtttttttttaatttttttttctcttaatgaacacattttctaaatgaattttttttgtagttactgtatatgtaccaagaaagatataacgttagggtttggttgtttttgtttttgtattttttttcttttgaaagggtttgttaatttttctaattttaccaaagtttgcagcctatacctcaataaaacagggatattttaaatcacatacctgcagacaaactggagcaatgttatttttaaagggtttttttcacctccttattcttagattattaatgtattagggaagaatgagacaattttgtgtaggctttttctaaagtccagtactttgtccagattttagattctcagaataaatgtttttcacagattgaaaaaaaaaaaaaa

SEQ ID NO: 456 - protein, 793 aa, Homo sapien
MWIQVRTMDGRQTHTVDSLSRLTKVEELRRKIQELFHVEPGLQRLFYRGKQMEDGHTLFDYEVRLNDTIQLLVRQSLVLPHSTKERDSELSDTDSGCCLGQSESDKSSTHGEAAAETDSRPADEDMWDETELGLYKVNEYVDARDTNMGAWFEAQVVRVTRKAPSRDEPCSSTSRPALEEDVIYHVKYDDYPENGVVQMNSRDVRARARTIIKWQDLEVGQVVMLNYNPDNPKERGFWYDAEISRKRETRTARELYANVVLGDDSLNDCRIIFVDEVFKIERPGEGSPMVDNPMRRKSGPSCKHCKDDVNRLCRVCACHLCGGRQDPDKQLMCDECDMAFHIYCLDPPLSSVPSEDEWYCPECRNDASEVVLAGERLRESKKKAKMASATSSSQRDWGKGMACVGRTKECTIVPSNHYGPIPGIPVGTMWRFRVQVSESGVHRPHVAGIHGRSNDGAYSLVLAGGYEDDVDHGNFFTYTGSGGRDLSGNKRTAEQSCDQKLTNTNRALALNCFAPINDQEGAEAKDWRSGKPVRVVRNVKGGKNSKYAPAEGNRYDGIYKVVKYWPEKGKSGFLVWRYLLRRDDDEPGPWTKEGKDRIKKLGLTMQYPEGYLEALANREREKENSKREEEEQQEGGFASPRTGKGKWKRKSAGGGPSRAGSPRRTSKKTKVEPYSLTAQQSSLIREDKSNAKLWNEVLASLKDRPASGSPFQLFLSKVEETFQCICCQELVFRPITTVCQHNVCKDCLDRSFRAQVFSCPACRYDLGRSYAMQVNQPLQTVLNQLFPGYGNGR

SEQ ID NO: 457 - DNA, 3354 bp, Homo sapien
ctgggtcctgtgtgtgccacaggggtggggtgtccagcgagcggtctcctcctcctgctagtgctgctgcggcgtcccgcggcctccccgagtcgggcgggaggggagagcgggtgtggatttgtcttgacggtaattgttgcgtttccacgtctcggaggcctgcgcgctgggttgctccttcttcgggagcgagctgttctcagcgatcccactcccagccggggctccccacacacactgggctgcgtgcgtgtggagtgggacccgcgcacacgcgtgtctctggacagctacggcgccgaaagaactaaaattccagatggcaaactcaatgaatggcagaaaccctggtggtcgaggaggaaatccccgaaaaggtcgaattttgggtattattgatgctattcaggatgcagttggaccccctaagcaagctgccgcagatcgcaggaccgtggagaagacttggaagctcatggacaaagtggtaagactgtgccaaaatcccaaacttcagttgaaaaatagcccaccatatatacttgatattttgcctgatacatatcagcatttacgacttatattgagtaaatatgatgacaaccagaaacttgcccaactcagtgagaatgagtactttaaaatctacattgatagccttatgaaaaagtcaaaacgggcaataagactctttaaagaaggcaaggagagaatgtatgaagaacagtcacaggacagacgaaatctcacaaaactgtcccttatcttcagtcacatgctggcagaaatcaaagcaatctttcccaatggtcaattccagggagataactttcgtatcacaaaagcagatgctgctgaattctggagaaagttttttggagacaaaactatcgtaccatggaaagtattcagacagtgccttcatgaggtccaccagattagctctagcctggaagcaatggctctaaaatcaacaattgatttaacttgcaatgattacatttcagtttttgaatttgatatttttaccaggctgtttcagccttggggctctattttgcggaattggaatttcttagctgtgacacatccaggttacatggcatttctcacatatgatgaagttaaagcacgactacagaaatatagcaccaaacccggaagctatattttccggttaagttgcactcgattgggacagtgggccattggctatgtgactggggatgggaatatcttacagaccatacctcataacaagcccttatttcaagccctgattgatggcagcagggaaggattttatctttatcctgatgggaggagttataatcctgatttaactggattatgtgaacctacacctcatgaccatataaaagttacacaggaacaatatgaattatattgtgaaatgggctccacttttcagctctgtaagatttgtgcagagaatgacaaagatgtcaagattgagccttgtgggcatttgatgtgcacctcttgccttacggcatggcaggagtcggatggtcagggctgccctttctgtcgttgtgaaataaaaggaactgagcccataatcgtggacccctttgatccaagagatgaaggctccaggtgttgcagcatcattgacccctttggcatgccgatgctagacttggacgacgatgatgatcgtgaggagtccttgatgatgaatcggttggcaaacgtccgaaagtgcactgacaggcagaactcaccagtcacatcaccaggatcctctccccttgcccagagaagaaagccacagcctgacccactccagatcccacatctaagcctgccacccgtgcctcctcgcctggatctaattcagaaaggcatagttagatctccctgtggcagcccaacaggttcaccaaagtcttctccttgcatggtgagaaaacaagataaaccactcccagcaccacctcctcccttaagagatcctcctccaccgccacctgaaagacctccaccaatcccaccagacaatagactgagtagacacatccatcatgtggaaagcgtgccttccagagacccgccaatgcctcttgaagcatggtgccctcgggatgtgtttgggactaatcagcttgtgggatgtcgactcctaggggagggctctccaaaacctggaatcacagcgagttcaaatgtcaatggaaggcacagtagagtgggctctgacccagtgcttatgcggaaacacagacgccatgatttgcctttagaaggagctaaggtcttttccaatggtcaccttggaagtgaagaatatgatgttcctccccggctttctcctcctcctccagttaccaccctcctccctagcataaagtgtactggtccgttagcaaattctctttcagagaaaacaagagacccagtagaggaagatgatgatgaatacaagattccttcatcccaccctgtttccctgaattcacaaccatctcattgtcataatgtaaaacctcctgttcggtcctgtgataatggtcactgtatgctgaatggaacacatggtccatcttcagagaagaaatcaaacatccctgacttaagcatatatttaaagggtacgtatagaatataatttcctttgtgatgtacatcttaatggtcagaatttaaaggcaaaatttcatgccattgtactgaaaatacattaaggttttgtgttatcctctaggagatgtttttgattcagcctctgatcccgtgccattaccacctgccaggcctccaactcgggacaatccaaagcatggttcttcactcaacaggacgccctctgattatgatcttctcatccctccattaggttgaaacctttaaaaaagttttgaacaacccacccctccttcttttaatttcagaattttcagaattcagagttcagtataacacagactcactgggttgtgaatttgcctgaaatttgaatgggttctccaggtgccggtgactcccaagttcacgagaccattactccatgtagatgattaaggtagtagtgtagtagttgggcatcagtcaggttttaagcaagttgttttgtccatactaaatgtagtctaaaaacacatgagagctttgtgctctagtagttttgaagtgatgacttgaagtgttgagattttctttaagtataataattcttaataaatatgaacttgcttttcttgcagcatgagcaccagttccacttacgctaattaaattatgcaaaattaaatagttgtatgtagagaactgataataaattctgttttattctaatcattacaactgtaacacattcaaaaaaaaaaa

SEQ ID NO: 458 - protein, 770 aa, Homo sapien
MANSMNGRNPGGRGGNPRKGRILGIIDAIQDAVGPPKQAAADRRTVEKTWKLMDKVVRLCQNPKLQLKNSPPYILDILPDTYQHLRLILSKYDDNQKLAQLSENEYFKIYIDSLMKKSKRAIRLFKEGKERMYEEQSQDRRNLTKLSLIFSHMLAEIKAIFPNGQFQGDNFRITKADAAEFWRKFFGDKTIVPWKVFRQCLHEVHQISSSLEAMALKSTIDLTCNDYISVFEFDIFTRLFQPWGSILRNWNFLAVTHPGYMAFLTYDEVKARLQKYSTKPGSYIFRLSCTRLGQWAIGYVTGDGNILQTIPHNKPLFQALIDGSREGFYLYPDGRSYNPDLTGLCEPTPHDHIKVTQEQYELYCEMGSTFQLCKICAENDKDVKIEPCGHLMCTSCLTAWQESDGQGCPFCRCEIKGTEPIIVDPFDPRDEGSRCCSIIDPFGMPMLDLDDDDDREESLMMNRLANVRKCTDRQNSPVTSPGSSPLAQRRKPQPDPLQIPHLSLPPVPPRLDLIQKGIVRSPCGSPTGSPKSSPCMVRKQDKPLPAPPPPLRDPPPPPPERPPPIPPDNRLSRHIHHVESVPSRDPPMPLEAWCPRDVFGTNQLVGCRLLGEGSPKPGITASSNVNGRHSRVGSDPVLMRKHRRHDLPLEGAKVFSNGHLGSEEYDVPPRLSPPPPVTTLLPSIKCTGPLANSLSEKTRDPVEEDDDEYKIPSSHPVSLNSQPSHCHNVKPPVRSCDNGHCMLNGTHGPSSEKKSNIPDLSIYLKGTYRI

SEQ ID NO: 459 - DNA, 565 bp, Homo sapien
ctgccctgacttctcatatcttgcctaggaactccaggcttgtcttggctccaaatggatcccaactgctcctgcaccacaggtggctcctgtgcctgcgccggctcctgcaagtgcaaagagtgcaaatgtacctcctgcaagaagtgctgctgctcttgctgccccgtgggctgtgccaagtgtgcccagggctgtgtctgcaaaggctcatcagagaagtgccgctgctgtgcctgatgttgggagagccctgctcccagacataaatagagcaaccagtactaacctggattttttttttaactaccctgaccggtttgctacattcttttttctattcaatatgtgaaagacaataaaacacgtttgacttgaaaaaaggcataacattacctggaagggatttcccaaaaatatgaaaacctcgggggcggacccccctagtctattcagcccaccggatatttactccgccgatgaaaaccgggccaaaaaactttctcaaaactagggcccggagagaccttgccgtctatcttggccgaatgcttggcatccagcc

SEQ ID NO: 460 - protein, 88 aa, Homo sapien
ALTSHILPRNSRLVLAPNGSQLLLHHRWLLCLRRLLQVQRVQMYLLQEVLLLLLPRGLCQVCPGLCLQRLIREVPLLCLMLGEPCSQT

SEQ ID NO: 461 - DNA, 4061 bp, Homo sapien
gaaggttgcagtgagccgagatcatgccattgtgctctaccctgggcaacagagcaagactccttctcaaaaaaaaaaaaaaaaatctaatcgttaaactttcaggaattttgtgagctgattgtaaacataacagttattacaaattaaagtatataaatgcacaagtacataaatgatcatatttaatacatcatttcctacttaatacatcatttcctactatctgtgcacttgaggttatttgcatctattggtagaaatactattaatacataatagtgtcctgctgcagtattgatagaacattaccccattgtaatcagtaaaatacaaactagaatttgatttattatttgttgattaaacttaagaaagtgaaggatagaatgttaatgcagattaaatttcaaagtgtgatgtgtctctgctagactaaatgcaatacaaaaaaattgaggaagttgctttgcaatattccaaaactcggccaggcatggtggctcacacctgtaatcccagcactttgggaggccaaggctggcagatcacttgaggtcaggagttcgagaccagcctgcccagtatagtgaaacctcatctctaccaaagatacaaaaactagccgggcgtggtggtgcatgcctatagtcccaactaattagccaggtgtcgtggcacgtgcctgtaatttcagctacttgggaggcagagacatgagaattgcttgaacccgggaggtggagtttacggtgagctgagatcgcgccactgcactccagcttgggtgacagagcgagactccgtctcaaaaaaaaaatttttttttaaactcttcattagttcggaaagatgttgatgtcattgatgaatgagcgaaactctaatatatgtctttattgtttcactttcatcttattcattaatgtaattgaaaatattatccacccttcatgttgctactacagtcagcccttcatatactgtgggttccacatccgtggattcacccaactgtagatggaaaatatttttttaaataataaaaatacaataataaacacattaaaaagtaatacattataaaaacttttatggcattgatattatattaggtattaaaaataatctagaaatgacctcaagtatagaggaggatatgcaaaggttgagtgcaaatacttcattttatacaagggacttgagcatgggaggattttggtatggggaggtgcaaatagcatactcatttgcgaaacatatgaccaaccattttgctaattggatgataattcatagtcaaattttgtgaaactgttgttggttgtagaattttaaaaactaatagtgggtttttcaagaaatagcaagtcatattgatattatagatataaactgaaaatcaggttaaatatttaagtttaaaatgtatttccaaaattagataatcactaagagaactttttacattgacccttaaagtgttatgaattttacttacatatgtaaaattatttttcagattctgtttcctaaaatgccaaaacgacagggtgattttttgcattttttaaatgtgaagaaggtgaaaacagacacagaaaataatgaagtgagcaaaaatcactgcagattgtctaaggcaaaggaaccacatttcgagtatattgaacaaccaatcattgaagaaaagccatcactttcatcaaagaaagaaatagataatcttgtgcttccagattgttggaatgaaaaacaagcatttatgtttacagaacaatacaaatggcttgaaataaaagaaggtaaattaggatgtaaggattgttcagcagttcggcatttgggatcgaaagcagaaaagcatgtccatgtgtccaaggaatggattgcatatttagtaacccctaatggcagtaataaaactactaggcaagcttctctacgaaaaaaaattagggaacatgatgtttctaaagcccatggtaaaattcaggatttgttaaaggaatcaactaatgattcaatttgtaatttagtgcataaacaaaataataaaaatattgatgctactgtaaaagttttcaatactgtttacagtttagtaaaacataacagacctttatctgatattgagggggcaagagaattacaggaaaaaaatggagaggtaaattgtttaaatacacgttacagtgcaacaagaatagcagaacatattgcaaaagaaatgaagatgaagatatttaagaatattatagaagagaatgccaaaatctgtatcataattgatgaggcatctacagtttcaaagaaaaccaccctagtgatttatctccagtgcacaattcagtcagctcctgcacctgttatgttatttgtggctttaaaagaattggtgtcaactatagcagagtgtattgtcaatacattattgactactttaaatgattgtggttttacaaatgaatatttgaaagcaaatttaattgcattttgttctgatggtgctaatacaatcctgggaagaaagtctggagtagctacaaaattgttagaaaattttcctgaaatcatcatttggaactgtttaaatcatcgattacaattgtcacttgatgattctatatccgaaataaaacaaattaatcatttaaaaatatttattgataaaatttattctatttatcatcaacctaataaaaatcaaaccaagcttctaggaactgtagctaaagaacttgaaactgaaattattaaaattggtcgagtaatgggaccaagatgggcggcatgtagtttacaagctgctactgctgtatggcatgcatatcctatattatatatgcatttttctcattcttactctggtttggcgaagagattagctaacattaatttcttacaagaccttgctttaatgattgacattcttgaagaattttcagtactttcaactgcattacagtcaagatcaactaatattaagaaagcacaaaaattgatcaaacgtaccataagagctttggaaaatttaaaaattggtactggaaagtatgaatctcaaattgaagatttgatcaagtcagataagtttaaagatattccatttaataaaaacaataaatttaatgctcttcctaggagtatattactagacaatataattcagcacatgaacctacgccttttatctgacagaaatcatgaagatatttttaattactttgatttgctggaaccttccacatggccttatgaagaaataacttcaccatggatagctggtgaaaaaacattatttcatttgtgtaaaattttaaaatatgaagttgatttgaatgattttcgggaatttgtaaataataatataaaatcaaacaatgtttcaattcctacaactatatacaaagctaaaaagatagttagcaccattgcaatcaatagtgctgaagctgaaaggggtttcaatttaatgaacataatttgtacaagggtgagaaatagtttaacaatagatcatgtatcagatttaatgacaataaatttactggggaaagaattagcagattgggatgcaacaccgtttgtaaaatcttggtcaaattgcaaccacaggttggctacagatacaagagttcggcaaaagtcaacaaaagtcttccatgagaatcaattggctatatggaacttaaaatagaatattgtatacgttttttgtcatctgtaaattatgtactacacatcctttatatacataaaggtctttttttttttttggaaagccagttaaacttttatcagcatgttgctgtttaaaaggcgttctttaagaagataatcttgaagattggttttagaagctatagttttttagagattggcccatgtttgctagagtgggtcataatacatattccatgaagttctgtacagaacaaacaccgtttataattttgtactgttttactttaagtaaggatgcaaaaaatagcaggactcagctaagttctaagccctggaggttatattaaataaaagagaaatggaataaaaactgt

SEQ ID NO: 462 - protein, 739 aa, Homo sapien
SVMNFTYICKIIFQILFPKMPKRQGDFLHFLNVKKVKTDTENNEVSKNHCRLSKAKEPHFEYIEQPIIEEKPSLSSKKEIDNLVLPDCWNEKQAFMFTEQYKWLEIKEGKLGCKDCSAVRHLGSKAEKHVHVSKEWIAYLVTPNGSNKTTRQASLRKKIREHDVSKAHGKIQDLLKESTNDSICNLVHKQNNKNIDATVKVFNTVYSLVKHNRPLSDIEGARELQEKNGEVNCLNTRYSATRIAEHIAKEMKMKIFKNIIEENAKICIIIDEASTVSKKTTLVIYLQCTIQSAPAPVMLFVALKELVSTIAECIVNTLLTTLNDCGFTNEYLKANLIAFCSDGANTILGRKSGVATKLLENFPEIIIWNCLNHRLQLSLDDSISEIKQINHLKIFIDKIYSIYHQPNKNQTKLLGTVAKELETEIIKIGRVMGPRWAACSLQAATAVWHAYPILYMHFSHSYSGLAKRLANINFLQDLALMIDILEEFSVLSTALQSRSTNIKKAQKLIKRTIRALENLKIGTGKYESQIEDLIKSDKFKDIPFNKNNKFNALPRSILLDNIIQHMNLRLLSDRNHEDIFNYFDLLEPSTWPYEEITSPWIAGEKTLFHLCKILKYEVDLNDFREFVNNNIKSNNVSIPTTIYKAKKIVSTIAINSAEAERGFNLMNIICTRVRNSLTIDHVSDLMTINLLGKELADWDATPFVKSWSNCNHRLATDTRVRQKSTKVFHENQLAIWNLK

SEQ ID NO: 463 - DNA, 1733 bp, Homo sapien
cgtacatacaatgcctccatcacgctacagcagcagctaaaagaactgacagccccggatgagaacatcccagcgaagatcctttcttataaccgtgccaatcgagctgttgcaattctttgtaaccatcagagggcaccaccaaaaacttttgagaagtctatgatgaacttgcaaactaagattgatgccaagaaggaacagctagcagatgcccggagagacctgaaaagtgctaaggctgatgccaaggtcatgaaggatgcaaagacgaagaaggtagtagagtcaaagaagaaggctgttcagagactggaggaacagttgatgaagctggaagttcaagccacagaccgagaggaaaataaacagattgccctgggaacctccaaactcaattatctggaccctaggatcacagtggcttggtgcaagaagtggggtgtcccaattgagaagatttacaacaaaacccagcgggagaagtttgcctgggccattgacatggctgatgaagactatgagttttagccagtctcaagaggcagagttctgtgaagaggaacagtgtggtttgggaaagatggataaactgagcctcacttgccctcgtgcctgggggagagaggcagcaagtcttaacaaaccaacatctttgcgaaaagataaacctggagatattataagggagagctgagccagttgtcctatggacaacttatttaaaaatatttcagatatcaaaattctagctgtatgatttgttttgaattttgtttttattttcaagagggcaagtggatgggaatttgtcagcgttctaccaggcaaattcactgtttcactgaaatgtttggattctcttagctactgtatgcaaagtccgattatattggtgcgtttttacagttagggttttgcaataacttctatattttaatagaaataaattcctaaactcccttccctctctcccatttcaggaatttaaaattaagtagaacaaaaaacccagcgcacctgttagagtcgtcactctctattgtcatggggatcaattttcattaaacttgaagcagtcgtggctttggcagtgttttggttcagacacctgttcacagaaaaagcatgatgggaaaatatttcctgacttgagtgttcctttttaaatgtgaatttttatttctttttaattattttaaaatatttaaacctttttcttgatcttaaagatcgtgtagattggggttggggagggatgaagggcgagtgaatctaaggataatgaaataatcagtgactgaaaccattttcccatcatcctttgttctgagcattcgctgtaccctttaagatatccatctttttctttttaaccctaatctttcacttgaaagattttattgtataaaaagtttcacaggtcaataaacttagaggaaaatgagtatttggtccaaaaaaaggaaaaataatcaagattttagggcttttattttttcttttgtaattgtgtaaaaaatggaaaaaaacataaaaagcagaattttaatgtgaagacattttttgctataatcattagttttagaggcattgttagtttagtgtgtgtgcagagtccatttcccacatctttcctcaagtatcttctatttttatcatgaattcccttttaatcaactgtaggttatttaaaataaattcctacaacttaatggaaaaaaaaaaaaaaa

SEQ ID NO: 464 - protein, 176 aa, Homo sapien
RTYNASITLQQQLKELTAPDENIPAKILSYNRANRAVAILCNHQRAPPKTFEKSMMNLQTKIDAKKEQLADARRDLKSAKADAKVMKDAKTKKVVESKKKAVQRLEEQLMKLEVQATDREENKQIALGTSKLNYLDPRITVAWCKKWGVPIEKIYNKTQREKFAWAIDMADEDYEF

SEQ ID NO: 465 - DNA, 2459 bp, Homo sapien
atgcctgaggaagtgcaccatggagaggaggaggtggagacttttgcctttcaggcagaaattgcccaactcatgtccctcatcatcaataccttctattccaacaaggagattttccttcgggagttgatctctaatgcttctgatgccttggacaagattcgctatgagagcctgacagacccttcgaagttggacagtggtaaagagctgaaaattgacatcatccccaaccctcaggaacgtaccctgactttggtagacacaggcattggcatgaccaaagctgatctcataaataatttgggaaccattgccaagtctggtactaaagcattcatggaggctcttcaggctggtgcagacatctccatgattgggcagtttggtgttggcttttattctgcctacttggtggcagagaaagtggttgtgatcagaaagcacaacgatgatgaacagtatgcttgggagtcttctgctggaggttccttcactgtgcgtgctgaccatggtgagcccattggcatgggtaccaaagtgatcctccatcttaaagaagatcagacagagtacctagaagagaggcgggtcaaagaagtagtgaagaagcattctcagttcataggctatcccatcaccctttatttggagaaggaacgagagaaggaaattagtgatgatgaggcagaggaagagaaaggtgagaaagaagaggaagataaagatgatgaagaaaagcccaagatcgaagatgtgggttcagatgaggaggatgacagcggtaaggataagaagaagaaaactaagaagatcaaagagaaatacattgatcaggaagaactaaacaagaccaagcctatttggaccagaaaccctgatgacatcacccaagaggagtatggagaattctacaagagcctcactaatgactgggaagaccacttggcagtcaagcacttttctgtagaaggtcagttggaattcagggcattgctatttattcctcgtcgggctccctttgacctttttgagaacaagaagaaaaagaacaacatcaaactctatgtccgccgtgtgttcatcatggacagctgtgatgagttgataccagagtatctcaattttatccgtggtgtggttgactctgaggatctgcccctgaacatctcccgagaaatgctccagcagagcaaaatcttgaaagtcattcgcaaaaacattgttaagaagtgccttgagctcttctctgagctggcagaagacaaggagaattacaagaaattctatgaggcattctctaaaaatctcaagcttggaatccacgaagactccactaaccgccgccgcctgtctgagctgctgcgctatcatacctcccagtctggagatgagatgacatctctgtcagagtatgtttctcgcatgaaggagacacagaagtccatctattacatcactggtgagagcaaagagcaggtggccaactcagcttttgtggagcgagtgcggaaacggggcttcgaggtggtatatatgaccgagcccattgacgagtactgtgtgcagcagctcaaggaatttgatgggaagagcctggtctcagttaccaaggagggtctggagctgcctgaggatgaggaggagaagaagaagatggaagagagcaaggcaaagtttgagaacctctgcaagctcatgaaagaaatcttagataagaaggttgagaaggtgacaatctccaatagacttgtgtcttcaccttgctgcattgtgaccagcacctacggctggacagccaatatggagcggatcatgaaagcccaggcacttcgggacaactccaccatgggctatatgatggccaaaaagcacctggagatcaaccctgaccaccccattgtggagacgctgcggcagaaggctgaggccgacaagaatgataaggcagttaaggacctggtggtgctgctgtttgaaaccgccctgctatcttctggcttttcccttgaggatccccagacccactccaaccgcatctatcgcatgatcaagctaggtctaggtattgatgaagatgaagtggcagcagaggaacccaatgctgcagttcctgatgagatcccccctctcgagggcgatgaggatgcgtctcgcatggaagaagtcgattaggttaggagttcatagttggaaaacttgtgcccttgtatagtgtccccatgggctcccactgcagcctcgagtgcccctgtcccacctggctccccctgctggtgtctagtgtttttttccctctcctgtccttgtgttgaaggcagtaaactaagggtgtcaagccccattccctctctactcttgacagcaggattggatgttgtgtattgtggtttattttattttcttcattttgttctgaaattaaagtatgcaaaataaagaatatgccgtttttatac

SEQ ID NO: 466 - protein, 724 aa, Homo sapien
MPEEVHHGEEEVETFAFQAEIAQLMSLIINTFYSNKEIFLRELISNASDALDKIRYESLTDPSKLDSGKELKIDIIPNPQERTLTLVDTGIGMTKADLINNLGTIAKSGTKAFMEALQAGADISMIGQFGVGFYSAYLVAEKVVVIRKHNDDEQYAWESSAGGSFTVRADHGEPIGMGTKVILHLKEDQTEYLEERRVKEVVKKHSQFIGYPITLYLEKEREKEISDDEAEEEKGEKEEEDKDDEEKPKIEDVGSDEEDDSGKDKKKKTKKIKEKYIDQEELNKTKPIWTRNPDDITQEEYGEFYKSLTNDWEDHLAVKHFSVEGQLEFRALLFIPRRAPFDLFENKKKKNNIKLYVRRVFIMDSCDELIPEYLNFIRGVVDSEDLPLNISREMLQQSKILKVIRKNIVKKCLELFSELAEDKENYKKFYEAFSKNLKLGIHEDSTNRRRLSELLRYHTSQSGDEMTSLSEYVSRMKETQKSIYYITGESKEQVANSAFVERVRKRGFEVVYMTEPIDEYCVQQLKEFDGKSLVSVTKEGLELPEDEEEKKKMEESKAKFENLCKLMKEILDKKVEKVTISNRLVSSPCCIVTSTYGWTANMERIMKAQALRDNSTMGYMMAKKHLEINPDHPIVETLRQKAEADKNDKAVKDLVVLLFETALLSSGFSLEDPQTHSNRIYRMIKLGLGIDEDEVAAEEPNAAVPDEIPPLEGDEDASRMEEVD

SEQ ID NO: 467 - DNA, 4415 bp, Homo sapien
gaccgcggctgcaggaacggaggcggaaggggccctgcggcgacgacgtcgtcgacgggggtggccgtgggagctgagcacggagaagactccctctctcggaagccggatcccgagccgggcaggatggatcaccaccagccggggactgggcgctaccaggtgcttcttaatgaagaggataactcagaatcatcggctatagagcagccacctacttcaaacccagcaccgcagattgtgcaggctgtgtcttcagcaccagcacttgaaactgactcttcccctccaccatatagtagtattactgtggaagtacctacaacttcagatacagaagtttacggtgagttttatcccgtgccacctccctatagcgttgctacctctcttcctacatacgatgaagctgagaaggctaaagctgctgcaatggcagctgcagcagcagaaacatctcaaagaattcaggaggaagagtgtccaccaagagatgacttcagtgatgcagaccagctcagagtggggaatgatggcattttcatgctggcatttttcatggcatttattttcaactggcttggattttgtttatccttctgtatcaccaataccatagctggaaggtatggtgctatctgcggatttggcctttccttgatcaaatggatccttattgtcaggttttctgattattttactggatatttcaatggacagtattggctttggtggatatttcttgtacttggcctgctccttttcttcagaggatttgttaattatctaaaagtcagaaacatgtctgaaagtatggcagctgctcatagaacaaggtatttcttcttattgtagagactgcatcaacccgacattcctttcttataccaatgtgaaatttccagatcatctgtaaacctacaactttaatagaagactactaataacagaagacaaattagtgaagaaaagacggagtttcgaaattgaatggcagggtggtttttgcttacaagccatttctgttcattctttaagtatctatatttcatttgttttgcacatatgcatatgtgcccatttaagatatttgcatatacttgatagaaaccataaagttgtagcagttaagtccagtcacatttggttaatcagtgtttgatataattgaaagagttgagtggataaacagtcttccagcttgtaaatgccattgacttctgacctgacatttagtataataaaaatgaaattcttaaccatgtcaaatgatttagtttctggctcttagactcatctggcagttctacacatgaaacatcttttgttatataaggtgtattgaaacctgcagtgctgattattagaaaggatttgtcggatttttgaacatgatatttacattattatttaggaaaactcttcctgtaaataaccatgcataacttactttctgcaatgttttcttagaaattgtgtccagatagctttcactaattttaaattaagtgaactaaatatatatgtgtatatgtatacacatatatatacacacacacatatatatatttagaaacgtgagtgttaaagatagaatttgttttaggacaaattttaagaaaatgtgggaataccaaatgtcctttataagaaaaataaattttgttttaagggacataccagttttagggattttcagatgggaagctgcatttttaggattgcccatcttaagagatcttgcaggaagagattgtattagatattatatttatttcatttaagataattttcaaagttaattttctaaataagataattctcatttgtgtttgtcttttaaaaggccaataaaatatctttcagtatcattgtaataattttttagagtttaatttgtaaagcttagcaaataaaatcttgtactatgaatagcttcttgctttatgactttaggattaacttgtaaaaaacatatcctgaactgagatatgcaaaatactcattttcaagttatggaaatgtgtttgtggcatataggactgtggggtctgtgtgtgtagtgagagtgtgtagccactattataactggaatttaatttacattcataaactactatatttcccatcttgcaaatcattttatgtctcatctgtttttcctttcggttatatctttggttttgaataccaacatttaaaatgatggtattttatcttttaaacttaaaaattatttaatacagctatatggaccttataaaattgatttcttatttattattagacattactactaaaaggtacatctaactattcagggacatttttccatttccaaaaaataaaatttattatgctttataacctcttctgtattttctaattttttcattgtctttgataaataaaacagttttgttttgctaatatagcctattttttgttttgtctcattcagtttactttcctgcgtagaatttttattgttatattaaaatttttattgttgtattaaagtacctgtgttacaccccttgaagtaagacagtagcatggggtaaagaaaaaatatttagtttagttgcctaatttggaagttaattaaaattaaactgtactaataacatattcaaactcatgctggatctctttcatattaatttcttatagacctgtactttattctttcaataatttttaaatgaaattaagctttgctacatggtaattaaataattactaggaagcttagctatcaaacatcgacttactaaaatttcattttagcttttatggtatatgtgcttgttttctgaatatggatacatgttacttttgatccagcatcaaaacttcactttttgttttgacttttccccccaaatctgtaaggttcaagtatacatattactgaatcctctataattggcataattcaatggtagccttaaatctcatcatgtaagcaggggaatcagaatgttattttcaagaacttaatgttcccttcagatatataaaatcctgcatacttcatttcctgtgagcttgaacagctgctgttgtgttttggggatgcttgatcatctttgcactctgccttaaagattgaaaaatcaaaactcttgttagggtatctaaacatttttgagtgtgaactggggattggaagttaatacaaaaaaatttcaaattatttctattgtaaatgaataagctagtcatggctaggataatccattttcatgtatttatgcaataaactgaattttaaggcaaaaacaacacttttctatatagtgtatgcaggacagattttagaaacttagattaaaatacaaatcccattacatttggttaaaatgaatctctgcttaatggaaaaaatactaatctttagcctattttgagtctataagatatatttcattttagacatgccttctaagttgttcacagatttttacctgctaaaacaatattatttccagtaaaacctctcctaacaggaaaagtggagttcaaaatatccaattggagaaaaattcagagttccttcattaaatataatttttttcatctagtatgtactatttcaagaagtgcaaaaagtaatgatagtgaatgtgataccatacttaactaaggtaatatatatccttagtttgctcaaaagagtcctggttattcctgttttctcagcttaatagtgcctcatcgtactctcaaaagtgttctaatttggaggataagttatatgatcatcctgtgtataattgtagactgtaccaagaagcaactaccttagctccactgccctttgagggatggaactggggtaagggcaggagccagttattattgccacagtgttttctaatgaaccatttggcctgtagaagaggaatagtattttttttaatagttgtatttgaatgattccagcttatcgtaaatactaaactgaatggcttttatatttttaactgctgttaaatgttattttagcatttattagttgtttattatttaattcttcaaatagtcatatgaaaacatatatttgataaaggtcaattgttagatgataatgtgccattcattatcataggaatgtccttgcccatatataaaacatgctggcatgtattttacttgttaataaagttgtatagatgtggaagtgtgaacctgtgatgcatccttttcaaaatcagtttaagattcgcatattatcatgactgtgacctcactaaactgtttatgtgacaaacctttcaagattggagatgaaaacaacacttgtgaaattaggttggggttgcaacatcttttaacttctcagttatttgtatgtcaggaaacagattgtggtttaattttaataaacaaaatatcatctttttgaaaat

SEQ ID NO: 468 - protein, 284 aa, Homo sapien
DRGCRNGGGRGPAATTSSTGVAVGAEHGEDSLSRKPDPEPGRMDHHQPGTGRYQVLLNEEDNSESSAIEQPPTSNPAPQIVQAVSSAPALETDSSPPPYSSITVEVPTTSDTEVYGEFYPVPPPYSVATSLPTYDEAEKAKAAAMAAAAAETSQRIQEEECPPRDDFSDADQLRVGNDGIFMLAFFMAFIFNWLGFCLSFCITNTIAGRYGAICGFGLSLIKWILIVRFSDYFTGYFNGQYWLWWIFLVLGLLLFFRGFVNYLKVRNMSESMAAAHRTRYFFLL

SEQ ID NO: 469 - DNA, 2287 bp, Homo sapien
ggctgaggcagtggctccttgcacagcagctgcacgcgccgtggctccggatcttcttcgtctttgcagcgtagcccgagtcggtcagcgccagaggacctcagcagccatgtcgaagccccatagtgaagccgggactgccttcattcagacccagcagctgcacgcagccatggctgacacattcctggagcacatgtgccgcctggacattgattcaccacccatcacagcccggaacactggcatcatctgtaccattggcccagcttcccgatcagtggagacgttgaaggagatgattaagtctggaatgaatgtggctcgtctgaacttctctcatggaactcatgagtaccatgcggagaccatcaagaatgtgcgcacagccacggaaagctttgcttctgaccccatcctctaccggcccgttgctgtggctctagacactaaaggacctgagatccgaactgggctcatcaagggcagcggcactgcagaggtggagctgaagaagggagccactctcaaaatcacgctggataacgcctacatggaaaagtgtgacgagaacatcctgtggctggactacaagaacatctgcaaggtggtggaagtgggcagcaagatctacgtggatgatgggcttatttctctccaggtgaagcagaaaggtgccgacttcctggtgacggaggtggaaaatggtggctccttgggcagcaagaagggtgtgaaccttcctggggctgctgtggacttgcctgctgtgtcggagaaggacatccaggatctgaagtttggggtcgagcaggatgttgatatggtgtttgcgtcattcatccgcaaggcatctgatgtccatgaagttaggaaggtcctgggagagaagggaaagaacatcaagattatcagcaaaatcgagaatcatgagggggttcggaggtttgatgaaatcctggaggccagtgatgggatcatggtggctcgtggtgatctaggcattgagattcctgcagagaaggtcttccttgctcagaagatgatgattggacggtgcaaccgagctgggaagcctgtcatctgtgctactcagatgctggagagcatgatcaagaagccccgccccactcgggctgaaggcagtgatgtggccaatgcagtcctggatggagccgactgcatcatgctgtctggagaaacagccaaaggggactatcctctggaggctgtgcgcatgcagaacctgattgcccgtgaggcagaggctgccatctaccacttgcaattatttgaggaactccgccgcctggcgcccattaccagcgaccccacagaagccaccgccgtgggtgccgtggaggcctccttcaagtgctgcagtggggccataatcgtcctcaccaagtctggcaggtctgctcaccaggtggccagataccgcccacgtgcccccatcattgctgtgacccggaatccccagacagctcgtcaggcccacctgtaccgtggcatcttccctgtgctgtgcaaggacccagtccaggaggcctgggctgaggacgtggacctccgggtgaactttgccatgaatgttggcaaggcccgaggcttcttcaagaagggagatgtggtcattgtgctgaccggatggcgccctggctccggcttcaccaacaccatgcgtgttgttcctgtgccgtgatggaccccagagcccctcctccagcccctgtcccacccccttcccccagcccatccattaggccagcaacgcttgtagaactcactctgggctgtaacgtggcactggtaggttgggacaccagggaagaagatcaacgcctcactgaaacatggctgtgtttgcagcctgctctagtgggacagcccagagcctggctgccccatcatgtggccccacccaatcaagggaagaaggaggaatgctggactggaggcccctggagccagatggcaagagggtgacagcttcctttcctgtgtgtactctgtccagttcctttagaaaaaatggatgcccagaggactcccaaccctggcttggggtcaagaaacagccagcaagagttaggggccttagggcactgggctgttgttccattgaagccgactctggccctggcccttacttgcttctctagctctctaggcctctccagtttgcacctgtccccaccctccactcagctgtcctgcagcaaacactccaccctccaccttccattttcccccactactgcagcacctccaggcctgttgccgc

SEQ ID NO: 470 - protein, 531 aa, Homo sapien
MSKPHSEAGTAFIQTQQLHAAMADTFLEHMCRLDIDSPPITARNTGIICTIGPASRSVETLKEMIKSGMNVARLNFSHGTHEYHAETIKNVRTATESFASDPILYRPVAVALDTKGPEIRTGLIKGSGTAEVELKKGATLKITLDNAYMEKCDENILWLDYKNICKVVEVGSKIYVDDGLISLQVKQKGADFLVTEVENGGSLGSKKGVNLPGAAVDLPAVSEKDIQDLKFGVEQDVDMVFASFIRKASDVHEVRKVLGEKGKNIKIISKIENHEGVRRFDEILEASDGIMVARGDLGIEIPAEKVFLAQKMMIGRCNRAGKPVICATQMLESMIKKPRPTRAEGSDVANAVLDGADCIMLSGETAKGDYPLEAVRMQNLIAREAEAAIYHLQLFEELRRLAPITSDPTEATAVGAVEASFKCCSGAIIVLTKSGRSAHQVARYRPRAPIIAVTRNPQTARQAHLYRGIFPVLCKDPVQEAWAEDVDLRVNFAMNVGKARGFFKKGDVVIVLTGWRPGSGFTNTMRVVPVP

SEQ ID NO: 471 - DNA, 2551 bp, Homo sapien
gcaagagtgacacacaggtgttcaaagacgcttctggggagtgagggaagcggtttacgagtgacttggctggagcctcaggggcgggcactggcacggaacacaccctgaggccagccctggctgcccaggcggagctgcctcttctcccgcgggttggtggacccgctcagtacggagttggggaagctctttcacttcggaggattgctcaacaaccatgctgggcatctggaccctcctacctctggttcttacgtctgttgctagattatcgtccaaaagtgttaatgcccaagtgactgacatcaactccaagggattggaattgaggaagactgttactacagttgagactcagaacttggaaggcctgcatcatgatggccaattctgccataagccctgtcctccaggtgaaaggaaagctagggactgcacagtcaatggggatgaaccagactgcgtgccctgccaagaagggaaggagtacacagacaaagcccatttttcttccaaatgcagaagatgtagattgtgtgatgaaggacatggcttagaagtggaaataaactgcacccggacccagaataccaagtgcagatgtaaaccaaactttttttgtaactctactgtatgtgaacactgtgacccttgcaccaaatgtgaacatggaatcatcaaggaatgcacactcaccagcaacaccaagtgcaaagaggaaggatccagatctaacttggggtggctttgtcttcttcttttgccaattccactaattgtttgggtgaagagaaaggaagtacagaaaacatgcagaaagcacagaaaggaaaaccaaggttctcatgaatctccaaccttaaatcctgaaacagtggcaataaatttatctgatgttgacttgagtaaatatatcaccactattgctggagtcatgacactaagtcaagttaaaggctttgttcgaaagaatggtgtcaatgaagccaaaatagatgagatcaagaatgacaatgtccaagacacagcagaacagaaagttcaactgcttcgtaattggcatcaacttcatggaaagaaagaagcgtatgacacattgattaaagatctcaaaaaagccaatctttgtactcttgcagagaaaattcagactatcatcctcaaggacattactagtgactcagaaaattcaaacttcagaaatgaaatccaaagcttggtctagagtgaaaaacaacaaattcagttctgagtatatgcaattagtgtttgaaaagattcttaatagctggctgtaaatactgcttggttttttactgggtacattttatcatttattagcgctgaagagccaacatatttgtagatttttaatatctcatgattctgcctccaaggatgtttaaaatctagttgggaaaacaaacttcatcaagagtaaatgcagtggcatgctaagtacccaaataggagtgtatgcagaggatgaaagattaagattatgctctggcatctaacatatgattctgtagtatgaatgtaatcagtgtatgttagtacaaatgtctatccacaggctaaccccactctatgaatcaatagaagaagctatgaccttttgctgaaatatcagttactgaacaggcaggccactttgcctctaaattacctctgataattctagagattttaccatatttctaaactttgtttataactctgagaagatcatatttatgtaaagtatatgtatttgagtgcagaatttaaataaggctctacctcaaagacctttgcacagtttattggtgtcatattatacaatatttcaattgtgaattcacatagaaaacattaaattataatgtttgactattatatatgtgtatgcattttactggctcaaaactacctacttctttctcaggcatcaaaagcattttgagcaggagagtattactagagctttgccacctctccatttttgccttggtgctcatcttaatggcctaatgcacccccaaacatggaaatatcaccaaaaaatacttaatagtccaccaaaaggcaagactgcccttagaaattctagcctggtttggagatactaactgctctcagagaaagtagctttgtgacatgtcatgaacccatgtttgcaatcaaagatgataaaatagattcttatttttcccccacccccgaaaatgttcaataatgtcccatgtaaaacctgctacaaatggcagcttatacatagcaatggtaaaatcatcatctggatttaggaattgctcttgtcatacccccaagtttctaagatttaagattctccttactactatcctacgtttaaatatctttgaaagtttgtattaaatgtgaattttaagaaataatatttatatttctgtaaatgtaaactgtgaagatagttataaactgaagcagatacctggaaccacctaaagaacttccatttatggaggatttttttgccccttgtgtttggaattataaaatataggtaaaagtacgtaattaaata

SEQ ID NO: 472 - protein, 335 aa, Homo sapien
MLGIWTLLPLVLTSVARLSSKSVNAQVTDINSKGLELRKTVTTVETQNLEGLHHDGQFCHKPCPPGERKARDCTVNGDEPDCVPCQEGKEYTDKAHFSSKCRRCRLCDEGHGLEVEINCTRTQNTKCRCKPNFFCNSTVCEHCDPCTKCEHGIIKECTLTSNTKCKEEGSRSNLGWLCLLLLPIPLIVWVKRKEVQKTCRKHRKENQGSHESPTLNPETVAINLSDVDLSKYITTIAGVMTLSQVKGFVRKNGVNEAKIDEIKNDNVQDTAEQKVQLLRNWHQLHGKKEAYDTLIKDLKKANLCTLAEKIQTIILKDITSDSENSNFRNEIQSLV

SEQ ID NO: 473 - DNA, 2355 bp, Homo sapien
atggcttctctggacgacccaggggaagtgagggagggcttcctctgccctctgtgcctgaaggatctgcagtctttctatcagcttcactcacattacgaggaagaacactcaggggaagaccgtgatgtcaaagggcaaattaaaagtcttgtccagaaggctaaaaaagcaaaggacaggttgttgaaacgagaaggggatgatcgagcagagtcagggacccaaggatatgagtctttcagctatggaggggttgatccttacatgtgggaaccccaggagcttggtgctgtgaggagccatctttccgacctcaaaaaacaccgagctgctagaattgaccactatgttgtggaagtcaataaactaataatcaggttagagaagctcactgcatttgacagaacaaatactgagtctgcaaagattcgagcaatagaaaagtctgtggtgccttgggtcaacgaccaggatgtccctttctgtccagactgtgggaataagttcagcatccggaaccgccgccaccactgccgcctctgcgggtctattatgtgcaagaagtgtatggagctcatcagccttcccttggcaaacaagctcaccagtgccagcaaggagtccctgagcacccacaccagccccagccagtcacccaacagtgtccatggctcccgccgaggcagcatcagcagcatgagcagtgtcagctcggtcctggatgagaaggacgatgaccggatccgctgctgtacacactgcaaggacacgctgctcaagagagagcagcagattgatgagaaggagcacacacctgacatcgtgaagctctacgagaaattacgactttgcatggagaaagttgaccagaaagctccagaatacatcaggatggcagcatcattaaatgctggggagacaacctacagtctggaacatgccagtgaccttcgagtggaagtgcagaaagtgtatgagctgatagacgctttaagtaagaagatcttaaccttgggcttgaaccaggaccctccaccacatccaagcaatttgcggctgcagagaatgatcagatactcagctacactttttgtgcaggaaaagttgcttggtttgatgtcactgccgaccaaagaacagtttgaggaactgaaaaagaaaaggaaggaggaaatggagaggaagagggccgtggagagacaagctgctctggagtcccagcgaaggcttgaggaaaggcagagtggcctggcttctcgagcggccaacggggaggtggcatctctccgcaggggccctgcccccttgagaaaggctgagggctggctcccactgtcaggaggtcaggggcagagtgaggactcagacccgctcctccagcagatccacaacatcacatcattcatcaggcaggccaaggccgcgggccgcatggatgaagtgcgcactctgcaggagaacctgcggcagctgcaggacgagtatgaccagcagcagacagagaaggccatcgagctgtcccggaggcaggctgaggaggaggacctgcagcgggaacagctgcagatgttgcgtgaacgggagttggaacgagaaagggagcagtttcgggtggcatccctgcacacacggactcggtccctggacttcagagaaatcggcccttttcagctggagcccagcagagagcctcgcacccaccttgcttatgctttggatctaggctcttccccagttccaagcagcacagctcccaagaccccttcacttagctcaactcaacccaccagagtgtggtctgggcccccagccgttggccaggagcgcttaccccagagcagcatgccacagcaacatgaggggccctccttaaacccctttgatgaggaagacctctccagccccatggaagaggccactactggtcctcctgctgcaggggtttccttagacccttcagcccgcatcctgaaggagtacaatcctttcgaggaagaggacgaggaggaggaagcagtggcagggaatccattcattcagccagacagcccagctcctaaccccttcagtgaggaagacgaacatccccagcagaggctctcaagccctctggttcctggtaacccctttgaggaacccacctgtatcaacccccttgagatggacagtgacagtgggccagaggctgaggagcccatagaggaagagctcctcctgcagcagatcgataacatcaaggcatacatctttgatgccaagcagtgcggccgcctggatgaggtagaggtgctgacagagaatctgcgggagctgaagcacaccctggccaagcagaaggggggcactgactga

SEQ ID NO: 474 - protein, 784 aa, Homo sapien
MASLDDPGEVREGFLCPLCLKDLQSFYQLHSHYEEEHSGEDRDVKGQIKSLVQKAKKAKDRLLKREGDDRAESGTQGYESFSYGGVDPYMWEPQELGAVRSHLSDLKKHRAARIDHYVVEVNKLIIRLEKLTAFDRTNTESAKIRAIEKSVVPWVNDQDVPFCPDCGNKFSIRNRRHHCRLCGSIMCKKCMELISLPLANKLTSASKESLSTHTSPSQSPNSVHGSRRGSISSMSSVSSVLDEKDDDRIRCCTHCKDTLLKREQQIDEKEHTPDIVKLYEKLRLCMEKVDQKAPEYIRMAASLNAGETTYSLEHASDLRVEVQKVYELIDALSKKILTLGLNQDPPPHPSNLRLQRMIRYSATLFVQEKLLGLMSLPTKEQFEELKKKRKEEMERKRAVERQAALESQRRLEERQSGLASRAANGEVASLRRGPAPLRKAEGWLPLSGGQGQSEDSDPLLQQIHNITSFIRQAKAAGRMDEVRTLQENLRQLQDEYDQQQTEKAIELSRRQAEEEDLQREQLQMLRERELEREREQFRVASLHTRTRSLDFREIGPFQLEPSREPRTHLAYALDLGSSPVPSSTAPKTPSLSSTQPTRVWSGPPAVGQERLPQSSMPQQHEGPSLNPFDEEDLSSPMEEATTGPPAAGVSLDPSARILKEYNPFEEEDEEEEAVAGNPFIQPDSPAPNPFSEEDEHPQQRLSSPLVPGNPFEEPTCINPLEMDSDSGPEAEEPIEEELLLQQIDNIKAYIFDAKQCGRLDEVEVLTENLRELKHTLAKQKGGTD

SEQ ID NO: 475 - DNA, 1409 bp, Homo sapien
gaaagagacaaagcagcaattaaagtcagcccagcaccaactccgacgccaagcgttacactggaaactactttttaaagcaacaaaagagtctaaaacaaaatacaacatttcttaaatacactgtttccagaaagagctattttaacagaagcaactcaaagatatcccttcgacagaagtggaagtgctgaaaaatgctcatctctcacacagacttttgatggacaggagtttctaagtatcatgcctaccaacaagctgtaaaatgatcaccctgaacaatcaagatcaacctgtcccttttaacagctcacatccagatgaatacaaaattgcagcccttgtcttctatagctgtatcttcataattggattatttgttaacatcactgcattatgggttttcagttgtaccaccaagaagagaaccacggtaaccatctatatgatgaatgtggcattagtggacttgatatttataatgactttaccctttcgaatgttttattatgcaaaagatgaatggccatttggagagtacttctgccagattcttggagctctcacagtgttttacccaagcattgctttatggcttcttgcctttattagtgctgacagatacatggccattgtacagccgaagtacgccaaagaacttaaaaacacgtgcaaagccgtgctggcgtgtgtgggagtctggataatgaccctgaccacgaccacccctctgctactgctctataaagacccagataaagactccactcccgccacctgcctcaagatttctgacatcatctatctaaaagctgtgaacgtgctgaacctcactcgactgacattttttttcttgattcctttgttcatcatgattgggtgctacttggtcattattcataatctccttcacggcaggacgtctaagctgaaacccaaagtcaaggagaagtccataaggatcatcatcacgctgctggtgcaggtgctcgtctgctttatgcccttccacatctgtttcgctttcctgatgctgggaacgggggagaacagttacaatccctggggagcctttaccaccttcctcatgaacctcagcacgtgtctggatgtgattctctactacatcgtttcaaaacaatttcaggctcgagtcattagtgtcatgctataccgtaattaccttcgaagcatgcgcagaaaaagtttccgatctggtagtctacggtcactaagcaatataaacagtgaaatgttatgaataataaggttctttcatttcaatcccatcaaaattcacttcactaactactctggcgtcaatggatattctgtataatactatcaagtcccttttctcttgaaaaaataaattcattatcttcattttaaaaaaaaaaaaaaaa

SEQ ID NO: 476 - protein, 331 aa, Homo sapien
MITLNNQDQPVPFNSSHPDEYKIAALVFYSCIFIIGLFVNITALWVFSCTTKKRTTVTIYMMNVALVDLIFIMTLPFRMFYYAKDEWPFGEYFCQILGALTVFYPSIALWLLAFISADRYMAIVQPKYAKELKNTCKAVLACVGVWIMTLTTTTPLLLLYKDPDKDSTPATCLKISDIIYLKAVNVLNLTRLTFFFLIPLFIMIGCYLVIIHNLLHGRTSKLKPKVKEKSIRIIITLLVQVLVCFMPFHICFAFLMLGTGENSYNPWGAFTTFLMNLSTCLDVILYYIVSKQFQARVISVMLYRNYLRSMRRKSFRSGSLRSLSNINSEML

SEQ ID NO: 477 - DNA, 2362 bp, Homo sapien
ggaattccaaaaaaaaaaaatacgactacacctgctccggagcccgcggcggtacctgcagcggaggagctctgtcttccccttcatctcacgcgagcccggcgtcccgccgcgtgcgccccggcgcagcccgccagtccgcccggagcccgcccagtcgccgcgctgcacgcccggggtgaaccctctgccctcgctgggacagagggccccgcagccgtcatgctttccgccatctacacagtcctggcgggactgctgttcctgccgctcctggtgaacctctgctgcccatacttcttccaggacataggctacttcttgaaggtggccgccgtgggccggagggtgcgcagctacgggcagcggcggccggcgcgcaccatcctgcgggcgttcctggagaaagcgcgccagacgccacacaagccttttctgctcttccgcgacgagactctcacctacgcgcaggtggaccggcgcagcaatcaagtggcccgggcgctgcacgaccacctcggcctgcgccagggagactgcgtggcgctccttatgggtaacgagccggcctacgtgtggctgtggctggggctggtgaagctgggctgtgccatggcgtgcctcaattacaacatccgcgcgaagtccctgctgcactgcttccagtgctgcggggcgaaggtgctgctggtgtcgccagaactacaagcagctgtcgaagagatactgccaagccttaaaaaagatgatgtgtccatctattatgtgagcagaacttctaacacagatgggattgactctttcctggacaaagtggatgaagtatcaactgaacctatcccagagtcatggaggtctgaagtcactttttccactcctgccttatacatttatacttctggaaccacaggtcttccaaaagcagccatgatcactcatcagcgcatatggtatggaactggcctcacttttgtaagcggattgaaggcagatgatgtcatctatatcactctgcccttttaccacagtgctgcactactgattggcattcacggatgtattgtggctggtgctactcttgccttgcggactaaattttcagccagccagttttgggatgactgcagaaaatacaacgtcactgtcattcagtatatcggtgaactgcttcggtatttatgcaactcaccacagaaaccaaatgaccgtgatcataaagtgagactggcactgggaaatggcttacgaggagatgtgtggagacaatttgtcaagagatttggggacatatgcatctatgagttctatgctgccactgaaggcaatattggatttatgaattatgcgagaaaagttggtgctgttggaagagtaaactacctacagaaaaaaatcataacttatgacctgattaaatatgatgtggagaaagatgaacctgtccgagatgaaaatggatattgcgtcagagttcccaaaggtgaagttggacttctggtttgcaaaatcacacaacttacaccatttaatggctatgctggagcaaaggctcagacagagaagaaaaaactgagagatgtctttaagaaaggagacctctatttcaacagtggagatctcttaatggttgaccatgaaaatttcatctatttccacgacagagttggagatacattccggtggaaaggggaaaatgtggccaccactgaagttgctgatacagttggactggttgattttgtccaagaagtaaatgtttatggagtgcatgtgccagatcatgagggtcgcattggcatggcctccatcaaaatgaaagaaaaccatgaatttgatggaaagaaactctttcagcacattgctgattacctacctagttatgcaaggccccggtttctaagaatacaggacaccattgagatcactggaacttttaaacaccgcaaaatgaccctggtggaggagggctttaaccctgctgtcatcaaagatgccttgtatttcttggatgacacagcaaaaatgtatgtgcctatgactgaggacatctataatgccataagtgctaaaaccctgaaactctgaatattcccaggaggataactcaacatttccagaaagaaactgaatggacagccacttgatataatccaactttaatttgattgaagattgtgaggaaattttgtaggaaatttgcatacccgtaaagggagacttttttaaataacagttgagtctttgcaagtaaaaagatttagagattattatttttcagtgtgcacctactgtttgtatttgcaaactgagcttgttggagggaaggcattattttttaaaatacttagtaaattaaatgaac

SEQ ID NO: 478 - protein, 620 aa, Homo sapien
MLSAIYTVLAGLLFLPLLVNLCCPYFFQDIGYFLKVAAVGRRVRSYGQRRPARTILRAFLEKARQTPHKPFLLFRDETLTYAQVDRRSNQVARALHDHLGLRQGDCVALLMGNEPAYVWLWLGLVKLGCAMACLNYNIRAKSLLHCFQCCGAKVLLVSPELQAAVEEILPSLKKDDVSIYYVSRTSNTDGIDSFLDKVDEVSTEPIPESWRSEVTFSTPALYIYTSGTTGLPKAAMITHQRIWYGTGLTFVSGLKADDVIYITLPFYHSAALLIGIHGCIVAGATLALRTKFSASQFWDDCRKYNVTVIQYIGELLRYLCNSPQKPNDRDHKVRLALGNGLRGDVWRQFVKRFGDICIYEFYAATEGNIGFMNYARKVGAVGRVNYLQKKIITYDLIKYDVEKDEPVRDENGYCVRVPKGEVGLLVCKITQLTPFNGYAGAKAQTEKKKLRDVFKKGDLYFNSGDLLMVDHENFIYFHDRVGDTFRWKGENVATTEVADTVGLVDFVQEVNVYGVHVPDHEGRIGMASIKMKENHEFDGKKLFQHIADYLPSYARPRFLRIQDTIEITGTFKHRKMTLVEEGFNPAVIKDALYFLDDTAKMYVPMTEDIYNAISAKTLKL

SEQ ID NO: 479 - DNA, 1955 bp, Homo sapien
  unsure 1903: unknown base
ggtcgcgcagctgtgttcgcggactcaggtggaaggaatttcttctcttcgttgacgttgctggtgttcactgtttggaattagtcaagtttcgggaatcaccgtcgctgccatcaacatgtcggtcccaagcgctctcatgaagcaaccgcccattcagtctacggctggggccgtcccagttcgcaatgagaaaggtgagatttcaatggaaaaagtgaaggtaaagcgttatgtgtccggaaaaaggccagactatgcccctatggagtcctcagatgaggaggatgaagaatttcagttcattaagaaagccaaagaacaagaagcagagcctgaggaacaggaggaggattcatccagtgacccccggctacggcgtttacagaaccgtattagtgaagatgtggaagagagattggctcgacatcgaaaaatagtggaacctgaagtggtaggagagagtgactcagaagtagaaggagatgcttggcgcatggaacgagaagacagcagtgaagaagaggaggaggaaattgatgatgaggaaatagagcggcggcgtggcatgatgcgtcagcgagcacaggagagaaaaaatgaagagatggaagtcatggaagtggaagatgagggtcgttctggagaggagtcagaatcagagtctgagtatgaagagtacacagacagtgaagatgagatggagcctcgccttaagccagtcttcattcgaaagaaggaccgagtgacagttcaagaacgtgaagccgaagcattgaaacagaaggagctggagcaggaagccaaacgcatggctgaggaaaggcgccagtacacactccagattgtcggagaggaaaccccaaaagagctggaagagaacaagcgatccctggctgcattggatgcactcaatactgatgatgaaaatgatgaggaggaatatgaggcatggaaagttcgagagctaaaaagaatcaagagggacagagaagatcgagaagcgcttgagaaggagaaagcagaaattgaacgcatgcgaaacctgactgaggaagagaggagagctgaacttcgggcaaacggcaaagtcattaccaacaaagctgttaagggcaaatacaagttcttacagaagtattatcaccggggtgccttcttcatggatgaggatgaagaagtatacaagagagatttcagcgctcctaccctggaggatcatttcaataaaaccattcttcctaaagtcatgcaggtcaagaactttggacgctcaggtcgcaccaaatacactcaccttgtggatcaagataccacctcctttgactcagcttggggccaagagagtgcccagaacacaaagttcttcaaacaaaaggcagctggggtacgagatgtatttgagcggccatctgccaagaagcggaaaactacctagggtccaactgcttattcttccaactgtggaacacaaggggagtctcagcatctggtccttgattgggttttttcattgtttccttggcccctgtatccagatattggacttactgctatacttgtgatactgggtagcccagactttgaaggtgctttgtgaggtttggactcatgctgagaaacccacaggaaagcactgtccaggtaggattagaggcttcccacttaaaactatttctgagaaatcttaggttttatcactgctatggtttcccatatttacttgggactgttctgactttctttttccagcccttagcttgggttagaaaagtggacatgtaagtgaacaatgcattacttctaccttaggtttaggagtaatatacccggaaatctaagctcatggaaacatgttttccatttggggttggagtccgtttttctagttgtacatacttgnggatccatatatgtgtgcatgtcawgaaataaaagaatcacacaacaaaaaa

SEQ ID NO: 480 - protein, 439 aa, Homo sapien
MSVPSALMKQPPIQSTAGAVPVRNEKGEISMEKVKVKRYVSGKRPDYAPMESSDEEDEEFQFIKKAKEQEAEPEEQEEDSSSDPRLRRLQNRISEDVEERLARHRKIVEPEVVGESDSEVEGDAWRMEREDSSEEEEEEIDDEEIERRRGMMRQRAQERKNEEMEVMEVEDEGRSGEESESESEYEEYTDSEDEMEPRLKPVFIRKKDRVTVQEREAEALKQKELEQEAKRMAEERRQYTLQIVGEETPKELEENKRSLAALDALNTDDENDEEEYEAWKVRELKRIKRDREDREALEKEKAEIERMRNLTEEERRAELRANGKVITNKAVKGKYKFLQKYYHRGAFFMDEDEEVYKRDFSAPTLEDHFNKTILPKVMQVKNFGRSGRTKYTHLVDQDTTSFDSAWGQESAQNTKFFKQKAAGVRDVFERPSAKKRKTT

SEQ ID NO: 481 - DNA, 1358 bp, Homo sapien
gcgacccggggcgtttgcagcggtgccgaggaagaggacgggaacggtgttacgattgcctgcgtttaggaggtggctgcgttgtgggaaaagctatcaaggaagaaattgccaaaccatgtctttttttctgttttcagagtagttcacaacagatctgagtgttttaattaagcatggaatacagaaaacaacaaaaaacttaagctttaatttcatctggaattccacagttttcttagctccctggacccggttgacctgttggctcttcccgctggctgctctatcacgtggtgctctccgactactcaccccgagtgtaaagaaccttcggctcgcgtgcttctgagctgctgtggatggcctcggctctctggactgtccttccgagtaggatgtcactgagatccctcaaatggagcctcctgctgctgtcactcctgagtttctttgtgatgtggtacctcagccttccccactacaatgtgatagaacgcgtgaactggatgtacttctatgagtatgagccgatttacagacaagactttcacttcacacttcgagagcattcaaactgctctcatcaaaatccatttctggtcattctggtgacctcccacccttcagatgtgaaagccaggcaggccattagagttacttggggtgaaaaaaagtcttggtggggatatgaggttcttacatttttcttattaggccaagaggctgaaaaggaagacaaaatgttggcattgtccttagaggatgaacaccttctttatggtgacataatccgacaagattttttagacacatataataacctgaccttgaaaaccattatggcattcaggtgggtaactgagttttgccccaatgccaagtacgtaatgaagacagacactgatgttttcatcaatactggcaatttagtgaagtatcttttaaacctaaaccactcagagaagtttttcacaggttatcctctaattgataattattcctatagaggattttaccaaaaaacccatatttcttaccaggagtatcctttcaaggtgttccctccatactgcagtgggttgggttatataatgtccagagatttggtgccaaggatctatgaaatgatgggtcacgtaaaacccatcaagtttgaagatgtttatgtcgggatctgtttgaatttattaaaagtgaacattcatattccagaagacacaaatcttttctttctatatagaatccatttggatgtctgtcaactgagacgtgtgattgcagcccatggcttttcttccaaggagatcatcactttttggcaggtcatgctaaggaacaccacatgccattattaa

SEQ ID NO: 482 - protein, 331 aa, Homo sapien
MASALWTVLPSRMSLRSLKWSLLLLSLLSFFVMWYLSLPHYNVIERVNWMYFYEYEPIYRQDFHFTLREHSNCSHQNPFLVILVTSHPSDVKARQAIRVTWGEKKSWWGYEVLTFFLLGQEAEKEDKMLALSLEDEHLLYGDIIRQDFLDTYNNLTLKTIMAFRWVTEFCPNAKYVMKTDTDVFINTGNLVKYLLNLNHSEKFFTGYPLIDNYSYRGFYQKTHISYQEYPFKVFPPYCSGLGYIMSRDLVPRIYEMMGHVKPIKFEDVYVGICLNLLKVNIHIPEDTNLFFLYRIHLDVCQLRRVIAAHGFSSKEIITFWQVMLRNTTCHY

SEQ ID NO: 483 - DNA, 2419 bp, Homo sapien
cgaaaggccggccttggctgcgacagcctgggtaagaggtgtaggtcggcttggttttctgctacccggagctgggcaagcgggttgggagaacagcgaagacagcgtgagcctgggccgttgcctcgaggctctcgcccggcttctcttgccgacccgccacgtttgtttggatttaatcttacagctggttgccggcgcccgcccgcccgctggcctcgcggtgtgagagggaagcacccgtgcctgtggctggtggctggcgcctggagggtccgcacacccgcccggccgcgccgctttgcccgcggcagccgcgtccctgaaccgcggagtcgtgtttgtgtttgacccgcgggcgccggtggcgcgcggccgaggccggtgtcggcggggcggggcggtcgcggcggaggcagaggaagagggagcgggagctctgcgaggccgggcgccgccatggaactgggcccgagccccgcaccgcgccgcctgctcttcgcctgcagcccccctcccgcgtcgcagcccgtcgtgaaggcgctatttggcgcttcagccgccgggggactgtcgcctgtcaccaacctgaccgtcactatggaccagctgcagggtctgggcagtgattatgagcaaccactggaggtgaagaacaacagtaatctgcagagaatgggctcctccgagtcaacagattcaggtttctgtctagattctcctgggccattggacagtaaagaaaaccttgaaaatcctatgagaagaatacattccctacctcaaaagctgttgggatgtagtccagctctgaagaggagccattctgattctcttgaccatgacatctttcagctcatcgacccagatgagaacaaggaaaatgaagcctttgagtttaagaagccagtaagacctgtatctcgtggctgcctgcactctcatggactccaggagggtaaagatctcttcacacagaggcagaactctgcccagctcggaatgctttcctcaaatgaaagagatagcagtgaaccagggaatttcattcctctttttacaccccagtcacctgtgacagccactttgtctgatgaggatgatggcttcgtggaccttctcgatggagagaatctgaagaatgaggaggagaccccctcgtgcatggcaagcctctggacagctcctctcgtcatgagaactacaaaccttgacaaccgatgcaagctgtttgactccccttccctgtgtagctccagcactcggtcagtgttgaagagaccagaacgttctcaagaggagtctccacctggaagtacaaagaggaggaagagcatgtctggggccagccccaaagagtcaactaatccagagaaggcccatgagactcttcatcagtctttatccctggcatcttcccccaaaggaaccattgagaacattttggacaatgacccaagggaccttataggagacttctccaagggttatctctttcatacagttgctgggaaacatcaggatttaaaatacatctctccagaaattatggcatctgttttgaatggcaagtttgccaacctcattaaagagtttgttatcatcgactgtcgatacccatatgaatacgagggaggccacatcaagggtgcagtgaacttgcacatggaagaagaggttgaagacttcttattgaagaagcccattgtacctactgatggcaagcgtgtcattgttgtgtttcactgcgagttttcttctgagagaggtccccgcatgtgccggtatgtgagagagagagatcgcctgggtaatgaataccccaaactccactaccctgagctgtatgtcctgaaggggggatacaaggagttctttatgaaatgccagtcttactgtgagccccctagctaccggcccatgcaccacgaggactttaaagaagacctgaagaagttccgcaccaagagccggacctgggcaggggagaagagcaagagggagatgtacagtcgtctgaagaagctctgagggcggcaggaccagccagcagcagcccaagcttccctccatccccctttaccctctttcctgcagagaaacttaagcaaaggggacagctgtgtgacatttggagagggggcctgggacttccatgccttaaacctacctcccacactcccaaggttggagcccagggcatcttgctggctacgcctcttctgtccctgttagacgtcctccgtccatatcagaactgtgccacaatgcagttctgagcaccgtgtcaagctgctctgagccacagtgggatgaaccagccggggccttatcgggctccagcatctcatgaggggagaggagacggaggggagtagagaagtttacacagaaatgctgctggccaaatagcaaagag

SEQ ID NO: 484 - protein, 523 aa, Homo sapien
MELGPSPAPRRLLFACSPPPASQPVVKALFGASAAGGLSPVTNLTVTMDQLQGLGSDYEQPLEVKNNSNLQRMGSSESTDSGFCLDSPGPLDSKENLENPMRRIHSLPQKLLGCSPALKRSHSDSLDHDIFQLIDPDENKENEAFEFKKPVRPVSRGCLHSHGLQEGKDLFTQRQNSAQLGMLSSNERDSSEPGNFIPLFTPQSPVTATLSDEDDGFVDLLDGENLKNEEETPSCMASLWTAPLVMRTTNLDNRCKLFDSPSLCSSSTRSVLKRPERSQEESPPGSTKRRKSMSGASPKESTNPEKAHETLHQSLSLASSPKGTIENILDNDPRDLIGDFSKGYLFHTVAGKHQDLKYISPEIMASVLNGKFANLIKEFVIIDCRYPYEYEGGHIKGAVNLHMEEEVEDFLLKKPIVPTDGKRVIVVFHCEFSSERGPRMCRYVRERDRLGNEYPKLHYPELYVLKGGYKEFFMKCQSYCEPPSYRPMHHEDFKEDLKKFRTKSRTWAGEKSKREMYSRLKKL

SEQ ID NO: 485 - DNA, 1916 bp, Homo sapien
ggagaaggggtttgagatagtgaattcctaagaagaaaataatggattgcatattagttgttctctaagtggactcaacagtgtgcaagcttgttggaaaagccaaaagaagatggcaactccttatgtcccagttcctatgcccataggaaactctgcttccagttttacaacaaacagaaatcaaagaagttcttcttttggcagtgtctcaacaagctcaaattcttctaagggccagttagaagactcaaatatgggtaattttaaacagacaagtgttcctgatcaaatggataatacttcatctgtctgtagcagtcccctcattaggactaaatttacaggtacagcttcttccattgagtattctactagaccaagagacactgaagaacaaaatccggaaacagtgaattgggaagatagaccatctacacctactatactgggttatgaagtgatggaagaaagagctaaatttactgtatataaaatactagtaaagaaaaccccagaagaaagctgggtagttttcagaagatacactgacttctctaggcttaatgacaaattaaaagagatgtttccaggttttcgattagcacttcctccaaaacgctggtttaaagataattacaatgctgactttttagaagacagacaattaggattacaagcgtttcttcaaaatttagtagctcacaaggacattgctaactgccttgcagtgagagaatttctttgtttggatgatccaccgggtccatttgatagcctagaagaaagcagggcattctgtgaaactttagaagagacaaactaccgcttacagaaagaactacttgaaaaacaaaaggagatggaatcactaaagaaactgctcagtgagaagcaacttcatatagacactttagagaacagaatcagaacattgtctttagaacctgaagaatcactggatgtgtcagaaacagaaggtgaacagatcctaaaggtggagtcctctgcacttgaggttgatcaagatgtctggatgagatctagagctgataataaaccatgcttaagttttagtgaacctgaaaatgctgtatcagagatagaagtagcagaagtggcatatgatgctgaagaagactaatgtatcacaagcagttccctccatttagactattcaaaaatttagaagagtggcaaatactattttaaaagaagaaccaagaactgtaaaacatatagaaaagagcaagaatgcacatgtataaagtttacataaagagtttttttagttattgagataggaaatatattcactgctgcttttaattgtattttatccaattacatttaatacactaaaaaaaatcttgttggaattctgttatcaaggcccacattcttaaatactgtgcataaattattatggtgttttgcctatatattgctccaaactactgtgtatatatgtatgtgtgttaaatcaccaattatattaatcaaatggaaattaattcgatgttcatatctgggtgatatattcttctttatatctctgacatgacatattttcattaatagtttaaatcagtgaccatcataataaagataaaatttagttgagtttttaatgtttacatgtttacatctctaaataaaatttgcttatttgaaatgttaatgctctttagaaaaatgactttctagtaccaaaggaaaactacttgaaagagctgtaatcatatagctaaagtgataagatagccttgattttaaaagctgattcattaatatcaaaatactttaataagtgtcacagttattaatatgtaacatttgtttagtttccacgtaatctttatctctacctagatttagtgagtttgcctctttcagaatactacctccttttgtta

SEQ ID NO: 486 - protein, 343 aa, Homo sapien [sequence omitted]

SEQ ID NO: 487 - DNA, 1287 bp, Homo sapien
ccctttcgctgcggcctttccccaacccggacccggcacttctcgggttccgcgactgccgatcgccccggcgcggcaccgctccctcaggagtcgcctaggccgcgcagtctcccgacttctcgtcaggctttcgcgccggcgctccagcaatcactggctggagaaggtgggcgttccggctcgagaggaccctgccgcggctccggaagagcctcgtcctgggcggcggtggtgcggcggtcgccgttatggccactgggctgggcggctgaccgcgggctaggaaagggcccagggcccgaatctcggtggccgctgctccagcgcggcctgcgccatggcctcctccgccgcctcctcggagcatttcgagaagctgcacgagatcttccgcggcctccatgaagacctacaaggggtgcccgagcggctgctggggacggcggggaccgaagaaaagaagaaattgatcagggattttgatgaaaagcaacaggaagcaaatgaaacgctggcagagatggaggaggagctacgttatgcacccctgtctttccgaaaccccatgatgtctaagcttcgaaactaccggaaggaccttgctaaactccatcgggaggtgagaagcacacctttgacagccacacctggaggccgaggagacatgaaatatggcatatatgctgtagagaatgagcatatgaatcggctacagtctcaaagggcaatgcttctgcagggcactgaaagcctgaaccgggccacccaaagtattgaacgttctcatcggattgccacagagactgaccagattggctcagaaatcatagaagagctgggggaacaacgagaccagttagaacgtaccaagagtagactggtaaacacaagtgaaaacttgagcaaaagtcggaagattctccgttcaatgtccagaaaagtgacaaccaacaagctgctgctttccattatcatcttactggagctcgccatcctgggaggcctggtttactacaaattctttcgcagccattgaacttctatagggaagggtttgtggaccagaactttgaccttgtgaatgcatgatgttagggatgtggatagaataagcatattgctgctgtgggctgacagttcaaggatgcactgtatagccaggctgtgggaggagggaggaaagatgaaaaaccacttaaatgtgaaggaacaacagcaacaagaccagtatgatataccaaggtaataaatgctgtttatgacttctttaaaaaaaaaaaaaaa

SEQ ID NO: 488 - protein, 232 aa, Homo sapien
MASSAASSEHFEKLHEIFRGLHEDLQGVPERLLGTAGTEEKKKLIRDFDEKQQEANETLAEMEEELRYAPLSFRNPMMSKLRNYRKDLAKLHREVRSTPLTATPGGRGDMKYGIYAVENEHMNRLQSQRAMLLQGTESLNRATQSIERSHRIATETDQIGSEIIEELGEQRDQLERTKSRLVNTSENLSKSRKILRSMSRKVTTNKLLLSIIILLELAILGGLVYYKFFRSH

SEQ ID NO: 489 - DNA, 484 bp, Homo sapien
tgcctatcatctggccacatgaggctgtcaagcaaaagaataggagtgtagttgagtagctggttggccctacatctctgagaagtgacggcacactgggttggcataagatatcctaaaatcacgctggaaccttgggcaaggaagaatgtgagcaagagtagagagagtgcctggatttcatgtcagtgaagccaagtcaccatatcatatttttgaatgaactctgagtcagttgaaatagggtaccatctaggtcagtttaagaagagtcagctcagagaaagcaagcataagggaaaatgtcacgtaaactagatcagggaacaaaatcctctccttgtggaaatatcccatgcagtttgttgatacaacttagtatcttattgcctaaaaaaaaatttcttatcattgtttcaaaaaagcaaaatcatggaaaatttttgttgtccaggcaaataaaaggtcattttaatttagctgc

SEQ ID NO: 490 - protein, 60 aa, Homo sapien
MSRKLDQGTKSSPCGNIPCSLLIQLSILLPKKKFLIIVSKKQNHGKFLLSRQIKGHFNLA

SEQ ID NO: 491 - DNA, 1585 bp, Homo sapien
acagcagttacactgcggcgggcgtctgttctagtgtttgagccgtcgtgcttcaccggtctacctcgctagcatgtcgggccgcggcaagactggcggcaaggcccgcgccaaggccaagtcgcgctcgtcgcgcgccggcctccagttcccagtgggccgtgtacaccggctgctgcggaagggccactacgccgagcgcgttggcgccggcgcgccagtgtacctggcggcagtgctggagtacctcaccgctgagatcctggagctggcgggcaatgcggcccgcgacaacaagaagacgcgaatcatcccccgccacctgcagctggccatccgcaacgacgaggagctcaacaagctgctgggcggcgtgacgatcgcccagggaggcgtcctgcccaacatccaggccgtgctgctgcccaagaagaccagcgccaccgtggggccgaaggcgccctcgggcggcaagaaggccacccaggcctcccaggagtactaagagggcccgcgccgcggccggccgccccagctccccatgccaccacaaaggcccttttaagggccaccaccgccctcatggaaagagctgagccgcttcagactgcggggcaagcgggccgcggctcccttcccctcccctcccctcgcccgccttcgccgcccggcctcgagtccccgcccgcccccgctcccgtcccgcaccgcctgccgcgtcggcctcgggcctgccctgtccgccgtccgccctccggtagggttcgggccttccggatgcggcttgggcgctcttcggggacctccgtggcgcggaagacccgagcctgccggggggaggccggcggcgccgcacctgcccgcctcggcgttcgtgactcagccgccccatcccgagtcgctaaggggctgcggggaggccgcagcaccttctggaagacttggccttccgctctgacgcagggccgaggtgggcagtccaggccgagagccggcggccctgaaggtgagtgaggccctcggcagctgcagccggggtgtctggtacccccccggcgtggtgcttagcccaggactttcagacggccgctggccgggaggctttggtgggagagacgcgatcgccgatttcggtctggcgccccttctgcggccgggacccaggcctttcacatcagctctccctccatcttcattcataggtctgcgctggggccgggacgaagcacttggtaacaggcacatcttcctcccgagtgactgcctcctaggaggacatttaggggagggcagaggcctgcagtttggcttcacggctggctatgtggacagcaagagtcgttttgcggaacgcgactggcagccaggcctgtcgggcccccgacgccgccccatttcccttccagcaaactcaactcggcaatccaagcacctagataccagcacaagtcggttaatccctgtctggactgagcctccgttggcttctgaactggaattctgcagctaacccttccacgactagaaccttaggcattggggagttttagatggactaattttattaaaggattgtttttttttt

SEQ ID NO: 492 - protein, 143 aa, Homo sapien
MSGRGKTGGKARAKAKSRSSRAGLQFPVGRVHRLLRKGHYAERVGAGAPVYLAAVLEYLTAEILELAGNAARDNKKTRIIPRHLQLAIRNDEELNKLLGGVTIAQGGVLPNIQAVLLPKKTSATVGPKAPSGGKKATQASQEY

SEQ ID NO: 493 - DNA, 1057 bp, Homo sapien
gatgacaataaggaagttcctttcctttgggattatttctgcctgaaagctcaagacttttagccacatcattgtctgggctccacgggaaggcagtgccacatgctgaggcatgctgggaaaagactttgttccatcctgttttgttgacatgctcttcatttttaagcctgaaaccgaagcttcctgctaagaattcaaaccatggagaaaaacgcagccatgataacggccactacttcctgagcctccagtgttccctgtgcttggggatccatatatgtcacttaaccttaaccttcacaacaccagggcagcctccattttcacaagtgaagaaatggaggcccagagtcacttagaagatgctcgaaggtgcacagctgctaagtggtggtgctgggatttgtcctcaggtcctcaagagtcctgactcttatgtgctggctccccacggaggcgtggagtcttgtttgctgggcatttgacagaaatgtttctgctcatcttctgccacaggttggtccttcagcgtcaagattcctgggccacttattaatagaaggcaccaggacacaggtgcagggatgcagagctggatgctgccttctcaataggagaagccaagaaacgcagatgccgatgcttaatcaactccgtctctccctctagtgactcggggatagctgccctgatgccaaggcgattgtcttctggaagcagccacgccgtgtgaggttcctcatcactgccctgcatctccctgcgagctctcggggataattgcaaaatcacgtttgattccaggggagcagaaagcagcaggagccgtgaattctccaactcttaactggtcctcgactggagccacttttccctgcccacccatccctgtggcggattcattacagttatccaaagccggttttaactttgctccccctgggctcagaagtctgtcagtgggtcctgagcggcttcaccattcaagtttattcctatcagcctggaatacaatgctctatctggctccggttgcttctccaaaccttctctc

SEQ ID NO: 494 - protein, 13 aa, Homo sapien
MLYLAPVASPNLL

SEQ ID NO: 495 - DNA, 1098 bp, Homo sapien
  unsure 184-206, 906-931: unknown base
aaaaaaaagaaaaaaaaagatatatatattcctactcttattaaatgaatatagcatttcttagcaacttcttttgatttgtgagtatatattttcttggcctcaaaattaaagtaaaaagtatcctcttactcagaggaggacaggggcaagagcctgggaccttatttgctaattaaaatgnnnnnnnnnnnnnnnnnnnnnnngacagacaattttgagagccattttaatataattgcctccctagaaacataccttttagggaatttttatcactaaaccacatgttatttaaatacgtacatgtttaacataaatacatacataaaattcacatgcatacttaacacttatgttaaatatattcaatgtatatacatatgtacacaatatatgcatatatacatgtgggtatgtggtatgtgtgcatgtgtgtgtatggccagctacataattgggggggactaggggcaaaatgaaactgtacggccctcgttcaaaaattaggtgtggggtgcttctaagcacagtcttgtgcaactgcacaggttgcatgtccatgaagccatcctgtgtgtgtgcacatatgtgtatgaatatgtattttatataatacatatatatgcatgtatgtatctgagaagaaatgtttaaaaggctacatacaagcttttccaggtctctactatctgttaactaactagagacataactcacaatatgcagtccccactgagtgttcaccataatttgagattcttggcatgttaacttttcattatggaatattgaataatttcaatattattcatacatttcttgatgttcaaacatacacaaaaatagaataatgaaactctacccatcacccagcctgggtgacaagagcaaaactcagtttcnnnnnnnnnnnnnnnnnnnnnnnnnntatatattcctactcttattaaatgaatatagcatttcttagcaacttcttttgatttgtgagtatatattttcttggcctcaaaattaaagtaaaaagtatcctcttactcagaggaggacaggggcaagagcctgggtgacaagagcaaaactcagtctcaaaaa

SEQ ID NO: 496 - protein, 20 aa, Homo sapien
KKRKKKIYIFLLLLNEYSIS

SEQ ID NO: 497 - DNA, 1362 bp, Homo sapien
cctgccggcagaactctatgcggtgcttttacaagagattatcgtcacaatgtactaaactgtcaggtacttattacagtgccggaatgttttgaaatcctgttgcttgctcctcatcgccaaaaatgggtggaaaggatcagatatgttatatttgatgaggcttcccactggccaaacccagtagaagctagagggctaaggaggctgggtgagccaattcccaaggtcagactcattggccagagaggaaggtggcgaatggtgtagatctggaaggacatagctatgttattatcaaaatgaatggaaagaactgtaaatagaattcaagctttgtattttgttgcttcaaggaattttcaacttaaaggaaaactaggtccattatcttggcagagaagttggagcaaaattttgggagctcctccttgtcattattcgatgtccctttttggttctttcagctaccataaataacccaaatcttctcaccaagtggctgcaatcagtaaaacagtactggaaacaggcagacaagattatggaagagaaatgtatttctgaaaaacaggctgacaaatgtctcaactttctccaagaccattcatataaaaaatcaatcatattgaagttagacttgtgctctgtggagagagataccatgatttagagaagcatatatgttcagtaaaacatgatgatgtttattttgatcattttcatccctgtgctgcgctaacgacagatattattgaaaagtatggattcccacctgatcttaccctcacccctcaagaaagcatccagctttatgataccatggctcaagtctgggaaacttggcccagggctcaggaattgtgtccagaggaattcattctttttaagaataagatagtcattaagaagttggatgctagaaaatatgaagaaaacttaaaggcagaattgacaaattggattaaaaatggccaagtgaagaaggtcaaaagagtactgaagaaccttagtccggattcattgtctagttcaaaagatatggtgaaaatgtttcctcttcttgtttaaaagttaagacaaatggataagttgcctgcaatattttttttgtttaagaatgatgatgtgggaaaaagagctggaagtgtgtgcacttttctggagaagacagagacaaaaagccatccccacactgaatgtcatagttatgtctttgcaatagatgaagtacttgaaaaagtgaggaagacacagaaaaggatcactaaaaaaaacccaaagaaggctgaaaaactggaaagaaaaaaagtgtataggagctgaatatattaatttcctggagaatctgaagattctgga

SEQ ID NO: 498 - protein, 89 aa, Homo sapien
PAGRTLCGAFTRDYRHNVLNCQVLITVPECFEILLLAPHRQKWVERIRYVIFDEASHWPNPVEARGLRRLGEPIPKVRLIGQRGRWRMV

SEQ ID NO: 499 - DNA, 860 bp, Homo sapien
agaggccacatctgcttcctgtaggccctctgggcagaagcatgcgctggtgtctcctcctgatctgggcccaggggctgaggcaggctcccctcgcctcaggaatgatgacaggcacaatagaaacaacggggaacatttctgcagagaaaggtggctctatcatcttacaatgtcacctctcctccaccacggcacaagtgacccaggtcaactgggagcagcaggaccagcttctggccatttgtaatgctgacttggggtggcacatctccccatccttcaaggatcgagtggccccaggtcccggcctgggcctcaccctccagtcgctgaccgtgaacgatacaggggagtacttctgcatctatcacacctaccctgatgggacgtacactgggagaatcttcctggaggtcctagaaagctcagtggctgagcacggtgccaggttccagattccattgcttggagccatggccgcgacgctggtggtcatctgcacagcagtcatcgtggtggtcgcgttgactagaaagaagaaagccctcagaatccattctgtggaaggtgacctcaggagaaaatcagctggacaggaggaatggagccccagtgctccctcacccccaggaagctgtgtccaggcagaagctgcacctgctgggctctgtggagagcagcggggagaggactgtgccgagctgcatgactacttcaatgtcctgagttacagaagcctgggtaactgcagcttcttcacagagactggttagcaaccagaggcatcttctggaagatacacttttgtctttgcaattatagatgaatatataagcagctgtactctccatcagtgc

SEQ ID NO: 500 - protein, 257 aa, Homo sapien
RPHLLPVGPLGRSMRWCLLLIWAQGLRQAPLASGMMTGTIETTGNISAEKGGSIILQCHLSSTTAQVTQVNWEQQDQLLAICNADLGWHISPSFKDRVAPGPGLGLTLQSLTVNDTGEYFCIYHTYPDGTYTGRIFLEVLESSVAEHGARFQIPLLGAMAATLVVICTAVIVVVALTRKKKALRIHSVEGDLRRKSAGQEEWSPSAPSPPGSCVQAEAAPAGLCGEQRGEDCAELHDYFNVLSYRSLGNCSFFTETG

SEQ ID NO: 501 - DNA, 1271 bp, Homo sapien
aacggtctaaggtagccaggcgggttagggctcaggcagggcttgagcgggacgagggggcgggctccgaggcgggctagatgcctgggctggatgaagtccgagtctgggaagagaaccgtgttgtggcgggaggaggcggtgattggggtggtggggctaagcgcgggggcagggctcgagcgaggggggcggggtagcacctccgcctgtcggtggtggggcggaggctggagggggtgggcctaggatgcgtgaggcggcagctcgcgtgggggcgtgaccatgcctggcgggggcggggccggaggcgggcggtttagagagcggggcggtcctgcggggtgggggcggggcctggtgggggcggggcctgtgcggtctgcggcgcggagccgagtgggctgcggggatgcgggggaccagctgcgtgggcggcggcgccgagagccccggaggcgcggggctgagcgagggcccgcgggggcgctggctgcgcttggctccggtatgcgcctacttcctctgcgtctcgctagctgccgtgctgctcgccgtgtactacggtctcatctgggtacccacgcggtctcccgcggcacccgccggcccacagcccagcgcgccgtcccctccgtgtgctgccctcccgggcgtgccgcctgtcccggcgcccgccgctgcctccctctcctgcctcctgggagtccccggcgggccgcgaccccagctccagctgccgctgagccgccgccgccgctacagcgaccctgaccgccgtccgagccgccagacacccagagagacgccagaggccgcggaggggcgaagacccgggtaactctcccttccaccccaacccggatcgccagccctcgagagctctgtgctccacgccgaggatgcaccgtctctggattggtccggccttcttcctaatgacatcgctcagcgtctctggagccgtcatcccgcggaatgggggcccagggggtgtcagctcggggccttgcctcttgcagctactctgtggtcaggccgggtcctccaccatcaggaagatcccatcctgagctctgtctcctgcccctcctgctgtgggatgctgagcacagagcccacagcccatctgcctcttcacctccctgaatccgtgtccatctgcaataaacgacagcctcggctgcctcgtgctgtgtcaaaaaaatctatgtcgggtgcggagaaagaggtaatgaaatggcaggaattcgatatcagcttatcgatac

SEQ ID NO: 502 - protein, 11 aa, Homo sapien
MKWQEFDISLS

SEQ ID NO: 503 - DNA, 3122 bp, Homo sapien
tttacgatatccaaataaactggacaccatcacatggacgtggcaaggacctggagcgctggaaatcctgtggctcacgctgtgtcagtttcacaaccaagtggaaatcgagttccttcctgtgtacagcccttctgaggaggagaagaggaaccccgcgctgtatgccagcaacgtgcggcgagtcatggccgaggccttgggtgtctccgtgactgactacacgttcgaggactgccagctggccctggcggaaggacagctccgtctccccgctgacacttgccttttagaatttgccaggctcgtgcggggcctcgggctaaaaccagaaaagcttgaaaaagatctggacagatactcagaaagagccaggatgaagggaggagagaagataggtattgcggagtttgccgcctccctggaagtccccgtttctgacttgctggaagacatgttttcactgttcgacgagagcggcagcggcgaggtggacctgcgagagtgtgtggttgccctgtctgtcgtctgccggccggcccggaccctggacaccatccagctggctttcaagacgtacggagcgcaagaggacggcagcgtcggcgaaggtgacctgtcctgcatcctcaagacggccctgggggtggcagagctcaccgtgaccgacctattccgagccattgaccaagaggagaaggggaagatcacattcgctgacttccacaggtttgcagaaatgtaccctgccttcgcagaggaatacctgtacccggatcagacacatttcgaaagctgtgcagagacctcacctgcgccaatcccaaacggcttctgtgccgatttcagcccggaaaactcagacgctgggcggaagcctgttcgcaagaagctggattaggacccagggttgcggagagacgcggcccctcccgcgtggacatcaccgccatgagcctctttgcgagtgacctctgggctccgctcctcactcctgctgtacaggcactgtcttcagcccgagttccaggggcctcgggggctgtttgtatcttgttcctttgtgaagtgtgttgcagaaccgacgcttactgtgcgagaatcggagggcgcgcacgcggatcccccgcctggcctggaccccgtggggtcaggttccctgccgggcggggggcaccggtgccgccccgtgttctcccacggggccctggtttcgagtctctgtcacagcctcttccggcggcagcgtgcaccgggcgggcctccgtgcacactcagcacacgcctgccacacagcgtgcgcttgcgtgtcactctggcacgaaacctgtctgcctctgtggatccacagcctggcagagccgagccgtcacctgatttttcagtgtttctacctgtgtgctggagctcatgagtattttataaactccatttaggtacttcaggaaacatgcagcattttttaaaaaatgaaaattgtttttctacttcatttttccttttagagtcaaaggatatttatttataggccttttttttttaatatagaatctgaggctgtttgggctttgacttaaatttccatcaggcctctctccagcaggtaatccctctgcttccgctgggtcccctggggaggtgtgaactcaagggcctagccccaaaacactttttctgcttttcttaatccttttccagtcccctctttttttataaacgttggcagtttgatgtttctgtttcggcataacgtaatccatttcactgtagcctaaactccagtccgaggttggatattgttcaaatgagcagggcccgagctggaagcgcaaggcagccgccgccgtgccgctcctcccttgccctcaggccaggtccctgctggaagcggctgcatcttcctgtcagccctggtttccatggtgactggcgtgacgcagccacctgagtatggctgaccttcctgcagagagaggagccgcagtcttttgcttgtggaaggagacgctgggctgtgcggtgcggagggtgatgaggatgtctggtgacagccgtgcggacaccactcctctctgcagcactgcctcccagcgccagggtcgcgggcacatcccactgagagcgggggtcctgccccatcttagagtcaaaggcagaggggcttccaggccctggatggggtattttggtgtcacctgaagtccctctgacatcaccttgtttcatcattttttatgacagaattagaaacccatccttcaagcacaataatcatcacagacttgagtttgcttcctaaagcaaaggctccgggtttgtttggaaaatttttttgatttctgaaatgaattgatttttatatttggggcatctctatagaaagtgaccaccaaggccagtaagtacgggaaaaaatgtttactaacttcctcagagattcgtgatacgcgtttctccactgacagacatttaaaaacaaccttcagctccgtttcaatcaatcacctcgacttgttttttagcatggacactgccagcaggacagacagggatggagtaaaccgaagtcaatttcagggctcttggcgtgttggacacagaagaaatcctagtgcagcctttggtagctaacagtcactgattttataattggagaatgcgtaaagattcatttttcaaggagaagagcctgcaaatggccaatgaaggaggtaaataaactaagatattccgagggaagggacccaggccacctcccttccgcaggtctgcagatgaagggttttttgaatgaaatgccactgcgcattttcagaaaaaaaaatctctgataaacagactttgaatggatgtttgttcctcctgattctcttttctcttcgtggcgacttagagttggcggatattcggaactgtgaatgtacatagcgttgagttaaaccccttgtgtgtgagacaggacgcagcgggcccctggtggcctgggggccagacccgtgggcaggtggggcatgggccctggcctgcggggacctgctggggtgtgagggcagagggagggttgccatgaaggaacttgggattttcaatggaataaataaaacataaagtctatacttggg

SEQ ID NO: 504 - protein, 237 aa, Homo sapien
MAEALGVSVTDYTFEDCQLALAEGQLRLPADTCLLEFARLVRGLGLKPEKLEKDLDRYSERARMKGGEKIGIAEFAASLEVPVSDLLEDMFSLFDESGSGEVDLRECVVALSVVCRPARTLDTIQLAFKTYGAQEDGSVGEGDLSCILKTALGVAELTVTDLFRAIDQEEKGKITFADFHRFAEMYPAFAEEYLYPDQTHFESCAETSPAPIPNGFCADFSPENSDAGRKPVRKKLD

SEQ ID NO: 505 - DNA, 1405 bp, Homo sapien
cgtcagtatagggagtgtgtgtatagggaggtggcatccgggagcccagcccagcagtgtctctgggcacagtgatttcagggggatggccagcagttgtgaaagacagaatgatctggaatgtctcattgggaagaccaaacccccttctcgctgcagataccagataagcacccatcttcactgtccactgtgcagcccagtcccctccagacagccccagcacagcatgaagaaggcacatgagcaccggcgacaggcttacaggacagggtgcagcggccagcatcccaggcatcagggacatgtgggatcttcccacacacctgggatgacatcgaattaacatgatgagaaaattgcatcttactgctaatcccagtacagaaccactatgggcaaatttataaaactaatctgcagagaggcaataactctgtctaaaaagaaaacttgtcccgtgtgattacaaaaacaggaaaaggctccaagctaggaaatgagatttgaggtatggagaacattctcacctgatggaagcatcctgttcctgtacaggaggaggagctggtgcaagccctaggccacatatgtcacagttgttttggaccctccgtagcttttatactcataaaatattaaagttgcccctttcatatttgggtcattgaaagagcccaccgtactctaggttcctgctcactatgcacaacatctcagaagatggcgtacaaaactatttttctaactatagcacgggtaatgtgggggtggggaggcttgggatatacctaaatgtggcaaatgatttatcttccaccttgagggatgaaaaggaaactatgcacttgaattttaattaaaattttaatttaattcattggatagcttgtgccagaaagaacagtcaatattcaagaagcaaaactgacgattagctcagtttcgggcctccctgtcgggggagttttcttgtctggaacacaaacacctacaagtagagtgtgagctggttcttgacaatcagatctcatcaaccctttgaaatgttctgggcagcacagctccttggtctgcatggttggtgtaagtataatcaagtagtgaaattgtatggtatatacctatatgccaacagtgtacacccgtatgtgcagaatttgctaatataaccatttcaataaaaacctattgaaaaagctgatttgaccacatggagtattgttggtggtgacgtgtatcactgaggactctcttggttacaaatgacagaaaacccagcaaaactggctaacacaaaagggaatgtcatggctcccaaaagccaaaatgcccaggggtgcctatgtcaggcttggtgtgatttcaccctcaaatgctgacaccaagacacatgccaactttg

SEQ ID NO: 506 - protein, 114 aa, Homo sapien [sequence omitted]

SEQ ID NO: 507 - DNA, 1922 bp, Homo sapien
  unsure 523, 549, 592, 651-678: unknown base
cacatgcacctggcctctgcttttttattttaaaagcacaactaactggtagataaagtgatttgtctttagtatttgataactaatgggttttagagtgttatttataagatgtagtaaattatcctcatcattatttttaagacaaatttataagacaagtgtaatagaaatagatcaacagcacaatagaaaaagatggcagaaaacatgaatacgtaattcacagatgaaagcaaaacaaatggtccttttattaagggaatgcaaagttaaaaatcaactagacccttttttgtttgtttcttcttggattggcaaagaggagcacttaaaagctgtattttgttttggaggattagtttgggttatgtctactaatgactaaatgtgtacatacattttgacccattagttacacttcaaagaatttttatccaacaaaaatgtactgagacacattgcttagtataataagccattggaagcttacccaaatattcatcaatgagaaataggttangaaaattatagtacaaccatacatgnaactggatgtagctgtaaaagaaatgggatcgatttttttttngtaatgatatggaaggatactcaaagtatatcaagtgagaaaagatctaggaacaggannnnnnnnnnnnnnnnnnnnnnnnnnnngtagggacagggtctcaccatgttgcccaggcttaggagcaggatattagctaactcgtgttacttctgaaaatctttgaagctccccctgctcttttttccagaagtgtaaaaacaagcatgtatttagtattacacatttttaaaaaatgaaaaaatgctgctgtgtgaatgaaagagtatacatcgtgttgctccagatggtaaaactagagtagaatttactaaaataaagtttcagcacgtaaagtaaagcacttctctgctcttggccattttagacactaaccatctggagcaaccatgtaactcttgccactcatagctaacttaatgtaaagcacttctctgctcttggccattttagacactaaccatctggagcaaccatgtaactcttgccactcatagctaacttaatgtaaaaaaaaaaaaatcgcttgactttcttagcacttcacaaatgcttgtaagactgacaccaggagccctgtcatctaaaaggcactttatagagtgctttcaattcttctgttttttcattcattgctcaaaatagatcgtagtgagataagatagtctctggccttcttggtctttggcacaaggaagagggttccagagttgagagtaaggactttgcatcctttgccatagaatttgattaggggccataaaaaggaccattgtgttctagaatgtgaaggactaagcataccactttatagtgcaaggaataagtgaagaagtccttttataagaaaaactgcagtagagcaataacttgaaattacacttatttatatttacttttcattaaatgtaaattattttcttttaccacattgtactactagaaagagaatcaggagtttaggcattcagtcatagatattcgataccattgatttacttaagcacttctcatgtcaacaagacttaagcctgcagataattcctattttatcagtgttcgttatagcttccctgttggttttacttgtgagtcataagcctagtatggtgaatatctaggaaatttcacggtaacagggcttgtcttaggttttgagaacaggtgtaacttgacttctctctgctgtttgtcatcctacacttcccactacatctggtcctttttgtagggtgttgagaacaacatttttcttcatgcaggggaaagtggaagtgcatgttttctaagaaggacaaataggaatagaataaaagaaaaagtatattgg

SEQ ID NO: 508 - protein, 52 aa, Homo sapien
MKAKQMVLLLRECKVKNQLDPFLFVSSWIGKEEHLKAVFCFGGLVWVMSTND

SEQ ID NO: 509 - DNA, 3293 bp, Homo sapien
ccagaaacagacctgggagtggaacagcagcagttaggagaggaccctgctggggtccaggagcccgcctgcctggctgcccaaccagctccaacactgctggaggcctccattctctgttcaggggaaggcccactggttagctcagagatggcttctgcgtgctttctcccttccgtcctagagaacacatattttctgtttcctcccttgccttctcccacttggacctgctcagagccctgtgtactctggtgtgtggcctctctcccctctctcttttcctccttctggattctttcctatcttcatccacaatctctaccctttatcttgccgttactctaccccgagactgccttctgccctgggtcccaccaaatagatcctgtccttcccttagtgaaaatgaggccacctcttggggaacagaagacgccccagtgaaaacagagtgcaaacctggcctggcatgggagcctccttctggccaatcaggcaggccagagaacagcagcggagggccctgtctttcaggcagacctcatggctgagtgagcctcccctgggcccagcaccccacctcagcatggtccaagcccatggggggcgctccagagcacagccgttgaccttgtctttgggggcagccatgacccagcctccgcctgaaaaaacgccagccaagaagcatgtgcgactgcaggagaggcggggctccaatgtggctctgatgctggacgttcggtccctgggggccgtagaacccatctgctctgtgaacacaccccgggaggtcaccctacactttctgcgcactgctggacacccccttacccgctgggcccttcagcgccagccacccagccccaagcaactggaagaagaattcttgaagatcccttcaaactttgtcagccccgaagacctggacatccctggccacgcctccaaggaccgatacaagaccatcttgccaaatccccagagccgtgtctgtctaggccgggcacagagccaggaggacggagattacatcaatgccaactacatccgaggctatgacgggaaggagaaggtctacattgccacccagggccccatgcccaacactgtgtcggacttctgggagatggtgtggcaagaggaagtgtccctcattgtcatgctcactcagctccgagagggcaaggagaaatgtgtccactactggcccacagaagaggaaacctatggacccttccagatccgcatccaggacatgaaagagtgcccagaatacactgtgcggcagctcaccatccagtaccaggaagagcgccggtcagtaaagcacatcctcttttcggcctggccagaccatcagacaccagaatcagctgggcccctgctgcgcctagtggcagaggtggaggagagcccggagacagccgcccaccccgggcctatcgtagtccactgcagtgcagggattggccggacgggctgcttcatcgccacgcgaattggctgtcaacagctgaaagcccgaggagaagtggacattctgggtattgtgtgccaactgcggctagacagaggggggatgatccagacggcagagcagtaccagttcctgcaccacactttggccctgtatgcaggccagctgcctgaggaacccagcccctgacccctgccaccctccggtggcccaggtgcctacctccctcaagcctgggaaggtgggtctggggaaagtgggccgagtgatctgggggtaccccttgggttggtgtggggaaggagtgcctccttagtggtgcttgcagtcacaggaagcagcagcagtaaggacaaggggccggattccaggtcttcaacactggccactcctctgcttcctctgttggccccagatggacagtaaggggaacctccaatgtctctctgaacttaaagacaggagctggcatttatgacagacaaagaaagaagcccaggtgtcctggtgttctctgagacactctttgtgagcttcagtttcctgttctataacatgaacataagtgcttagctgccatgagggaaaagtaatgagagaagtttctagaagccactccagccactccttcctggggctgacaaaagggtgattccaagatcatccttcacccgaggtcctgcccaagcacaggccagatgcaagaatggggaaaagtctggtcctgatctccaagtctcaacatcctatcagtgactctgctccctgaccacacatcggaagggctggatgaccccaatcaaaagaaagaacaaggactctggttacccttgcctccacccatgtgtcataagagtaggctacagaggtgaccaggcctggcagttgaaatctctggaagagggaacatgtggggactactcagaggcaaagaggagctgctcctgcctccatggttgctggcctctcccaccaactactcttagggaggctaagcagtctctgttttgcttccatggctcaaataataccctgggtatgcaggacccactataccttgcatttgctgagtacacctagagagcttggctgtttccaaaaacaatcagggtcataaccatccatgcagacatggaggctcggctgaaccaggactcctcactgtctacctgagagaatgagcacccctcatccatctcagcatcaacacaatttccaggggacctcaggtctacctcaggactgaacgccacacctcaggattcctcctccttgaatctgagactggctgcccattctgagatggggatgaaggtaagatgccgcatcaccaggcacgccgcccctgacagctgccttgataccagctctctgtggaaacccccgaggagttggatctggagaacagctgggcctcctcactcaggacttctctcctgaagaacacgcagtgctaaaactgaggatgatttccctaatgcttctgcttggccttatggaggagctgctccttccttacagccttggggatggacttgcccacacctccacctcccctgagccctgtgagaggcacgactgtctatgccaatgaggctcggtggggggctctcaagtgcctgatcctgccctgggctcagagccagcccagagggaagcaactgcacagccccacaggccctccttggcactgtccccccaaccccatctcagagctcagagggtacaagctccagaacagtaaccaagtgggaaaataaagacttcttggatgactgaaaaaaaaaaaaaaaaaaaaaaaaaaaaaaaa

SEQ ID NO: 510 - protein, 360 aa, Homo sapien
MVQAHGGRSRAQPLTLSLGAAMTQPPPEKTPAKKHVRLQERRGSNVALMLDVRSLGAVEPICSVNTPREVTLHFLRTAGHPLTRWALQRQPPSPKQLEEEFLKIPSNFVSPEDLDIPGHASKDRYKTILPNPQSRVCLGRAQSQEDGDYINANYIRGYDGKEKVYIATQGPMPNTVSDFWEMVWQEEVSLIVMLTQLREGKEKCVHYWPTEEETYGPFQIRIQDMKECPEYTVRQLTIQYQEERRSVKHILFSAWPDHQTPESAGPLLRLVAEVEESPETAAHPGPIVVHCSAGIGRTGCFIATRIGCQQLKARGEVDILGIVCQLRLDRGGMIQTAEQYQFLHHTLALYAGQLPEEPSP

SEQ ID NO: 511 - DNA, 1533 bp, Homo sapien
atggcggcggagctggtggaggccaaaaacatggtgatgagttttcgagtctccgaccttcagatgctcctgggtttcgtgggccggagtaagagtggactgaagcacgagctcgtcaccagggccctccagctggtgcagtttgactgtagccctgagctgttcaagaagatcaaggagctgtacgagacccgctacgccaagaagaactcggagcctgccccacagccgcaccggcccctggaccccctgaccatgcactccacctacgaccgggccggcgctgtgcccaggactccgctggcaggccccaatattgactaccccgtgctctacggaaagtacttaaacggactgggacggttgcccgccaagaccctcaagccagaagtccgcctggtgaagctgccgttctttaatatgctggatgagctgctgaagcccaccgaattagtcccacagaacaacgagaagcttcaggagagcccgtgcatcttcgcattgacgccaagacaggtggagttgatccggaaattccagggaatgcagcccggagttaaagccgtgcaggtcgtcctgagaatctgttactcagacaccagctgccctcaggaggaccagtacccgcccaacatcgctgtgaaggtcaaccacagctactgctccgtcccgggctactacccctccaataagcccggggtggagcccaagaggccgtgccgccccatcaacctcactcacctcatgtacctgtcctcggccaccaaccgcatcactgtcacctgggggaactacggcaagagctactcggtggccctgtacctggtgcggcagctgacctcatcggagctgctgcagaggctgaagaccattggggtaaagcacccggagctgtgcaaggcactggtcaaggagaagctgcgccttgatcctgacagcgagatcgccaccaccggtgtgcgggtgtccctcatctgtccgctggtgaagatgcggctctccgtgccctgccgggcagaaacctgcgcccacctgcagtgcttcgacgccgtcttctacctgcagatgaacgagaagaagcccacctggatgtgccccgtgtgcgacaagccagccccctacgaccagctcatcatcgacgggctcctctcgaagatcctgagcgagtgtgaggacgccgacgagatcgagtacctggtggacggctcgtggtgcccgatccgcgccgaaaaggagcgcagctgcagcccgcagggcgccatcctcgtgctgggcccctcggacgccaatgggctcctgcccgcccccagcgtcaacgggagcggtgccctgggcagcacgggtggcggcggcccggtgggcagcatggagaatgggaagccgggcgccgatgtggtggacctcacgctggacagctcatcgtcctcggaggatgaggaggaggaggaagaggaggaggaagacgaggacgaagaggggccccggcccaagcgccgctgccccttccagaagggcctggtgccggcctgctga

SEQ ID NO: 512 - protein, 510 aa, Homo sapien
MAAELVEAKNMVMSFRVSDLQMLLGFVGRSKSGLKHELVTRALQLVQFDCSPELFKKIKELYETRYAKKNSEPAPQPHRPLDPLTMHSTYDRAGAVPRTPLAGPNIDYPVLYGKYLNGLGRLPAKTLKPEVRLVKLPFFNMLDELLKPTELVPQNNEKLQESPCIFALTPRQVELIRKFQGMQPGVKAVQVVLRICYSDTSCPQEDQYPPNIAVKVNHSYCSVPGYYPSNKPGVEPKRPCRPINLTHLMYLSSATNRITVTWGNYGKSYSVALYLVRQLTSSELLQRLKTIGVKHPELCKALVKEKLRLDPDSEIATTGVRVSLICPLVKMRLSVPCRAETCAHLQCFDAVFYLQMNEKKPTWMCPVCDKPAPYDQLIIDGLLSKILSECEDADEIEYLVDGSWCPIRAEKERSCSPQGAILVLGPSDANGLLPAPSVNGSGALGSTGGGGPVGSMENGKPGADVVDLTLDSSSSSEDEEEEEEEEEDEDEEGPRPKRRCPFQKGLVPAC

SEQ ID NO: 513 - DNA, 636 bp, Homo sapien
gatcgcggagtcggtgctttagtacgccgctggcacctttactctcgccggccgcgcgaacccgtttgagctcggtatcctagtgcacacgcctttgcaagcgacggcgccatgagtctgacttccagttccagcgtacgagttgaatggatcgcagcagttaccattgctgctgggacagctgcaattggttatctagcttacaaaagattttatgttaaagatcatcgaaataaagctatgataaaccttcacatccagaaagacaaccccaagatagtacatgcttttgacatggaggatttgggagataaagctgtgtactgccgttgttggaggtccaaaaagttcccattctgtgatggggctcacacaaaacataacgaagagactggagacaatgtgggccctctgatcatcaagaaaaaagaaacttaaatggacacttttgatgctgcaaatcagcttgtcgtgaagttacctgattgtttaattagaatgactaccacctctgtctgattcaccttcgctggattctaaatgtggtatattgcaaactgcagctttcacatttatggcatttgtcttgttgaaacatcgtggtgcacatttgtttaaacaaaaaaaaaaaaaaaa

SEQ ID NO: 514 - protein, 108 aa, Homo sapien
MSLTSSSSVRVEWIAAVTIAAGTAAIGYLAYKRFYVKDHRNKAMINLHIQKDNPKIVHAFDMEDLGDKAVYCRCWRSKKFPFCDGAHTKHNEETGDNVGPLIIKKKET

SEQ ID NO: 515 - DNA, 1525 bp, Homo sapien
ccacaaatgtgggagggcgataaccactcgtagaaagcgtgagaagttactacaagcggtcctcccggccaccgtactgttccgctcccagaagccccgggcggcggaagtcgtcactcttaagaagggacggggccccacgctgcgcacccgcgggtttgctatggcgatgagcagcggcggcagtggtggcggcgtcccggagcaggaggattccgtgctgttccggcgcggcacaggccagagcgatgattctgacatttgggatgatacagcactgataaaagcatatgataaagctgtggcttcatttaagcatgctctaaagaatggtgacatttgtgaaacttcgggtaaaccaaaaaccacacctaaaagaaaacctgctaagaagaataaaagccaaaagaagaatactgcagcttccttacaacagtggaaagttggggacaaatgttctgccatttggtcagaagacggttgcatttacccagctaccattgcttcaattgattttaagagagaaacctgtgttgtggtttacactggatatggaaatagagaggagcaaaatctgtccgatctactttccccaatctgtgaagtagctaataatatagaacagaatgctcaagagaatgaaaatgaaagccaagtttcaacagatgaaagtgagaactccaggtctcctggaaataaatcagataacatcaagcccaaatctgctccatggaactcttttctccctccaccaccccccatgccagggccaagactgggaccaggaaagataattcccccaccacctcccatatgtccagattctcttgatgatgctgatgctttgggaagtatgttaatttcatggtacatgagtggctatcatactggctattatatgggtttcagacaaaatcaaaaagaaggaaggtgctcacattccttaaattaaggagaaatgctggcatagagcagcactaaatgacaccactaaagaaacgatcagacagatctggaatgtgaagcgttatagaagataactggcctcatttcttcaaaatatcaagtgttgggaaagaaaaaaggaagtggaatgggtaactcttcttgattaaaagttatgtaataaccaaatgcaatgtgaaatattttactggactcttttgaaaaaccatctgtaaaagactggggtgggggtgggaggccagcacggtggtgaggcagttgagaaaatttgaatgtggattagattttgaatgatattggataattattggtaattttatggcctgtgagaagggtgttgtagtttataaaagactgtcttaatttgcatacttaagcatttaggaatgaagtgttagagtgtcttaaaatgtttcaaatggtttaacaaaatgtatgtgaggcgtatgtggcaaaatgttacagaatctaactggtggacatggctgttcattgtactgtttttttctatcttctatatgtttaaaagtatataataaaaatatttaattttttttta

SEQ ID NO: 516 - protein, 262 aa, Homo sapien
MAMSSGGSGGGVPEQEDSVLFRRGTGQSDDSDIWDDTALIKAYDKAVASFKHALKNGDICETSGKPKTTPKRKPAKKNKSQKKNTAASLQQWKVGDKCSAIWSEDGCIYPATIASIDFKRETCVVVYTGYGNREEQNLSDLLSPICEVANNIEQNAQENENESQVSTDESENSRSPGNKSDNIKPKSAPWNSFLPPPPPMPGPRLGPGKIIPPPPPICPDSLDDADALGSMLISWYMSGYHTGYYMGFRQNQKEGRCSHSLN

SEQ ID NO: 517 - DNA, 682 bp, Homo sapien
aagtgcaaagcttttaacaatagaagtttcaagggctcaggaaggaccagggggccatctaggctctccatgagttcacgcttaacattatgtttacgtctgtcagataacaattttggttttccacatcaggtgcattgcactgttagatgggtcatcataaaggtcatcaatctagtggcattcattcaatttgcacatcctaactgtttcagcactatctgatttagcatgaaaatctgccagggcagtcccttgatattcaggttcagctttccatgtatgggcttcaatcttataagaatttgttatttatttttcacctttactcaagatagcttggaacttataccaatttgtgatggcaacaggatagtagcaagttcatccacttgagtctgtttttaataggggctccactagaagtgagaaaccctctttgtttccataacatgccaaaattgtggactgcaaaggcatgtatatatacatagcatgtctgctatgtatatagcattttctgatttccctttagctatatgataagctcaagtgagagcaaaagttctgcagtttgagctgactgaaactgggaagagtccgctttttattaactcattttgggttttaatgacatattttgccaaagaataatttcaaatgggggccgggcgtctgtgct

SEQ ID NO: 518 - protein, 74 aa, Homo sapien
KCKAFNNRSFKGSGRTRGPSRLSMSSRLTLCLRLSDNNFGFPHQVHCTVRWVIIKVINLVAFIQFAHPNCFSTI

SEQ ID NO: 519 - DNA, 1515 bp, Homo sapien
actagcggagccgcgagggagaggccgcggccccttcccgttgcctgcggccaccggccggcattcagagcccctcgcctggcgctaaatttaaaaacgtaacacgagcagcaggctggtctcggaaacgaaacgaaattcggtccctgggcctcctcccgggcgctgccggtccctcagcgcgccgcgccacccggaacagacccttctcccgccattttcggcggggctgggagactgaggcccgcggcgctgagcctgcggcgccccggaagaggcgggcggcatggccgctggcgtggactgcggggacggggttggcgcccggcagcacgtgttcctggtttcagaatatttaaaagatgcttcaaagaagatgaaaaatgggctaatgtttgtaaaactggttaacccctgttcaggagaaggagccatttacttgttcaatatgtgtctacagcagctgcttgaagtaaaagttttcaaggaaaaacaccattcttggtttataaatcaatcagttcaatcaggaggtcttctccattttgccacacctgtggatcctctatttctgcttctccactacctcataaaggctgataaggaggggaagtttcagccccttgatcaagttgtggtggataacgtgtttccaaattgcatcttgttgctgaaacttcctggacttgagaagttacttcatcatgtgacagaggaaaaaggtaatccagaaatagacaacaagaaatattacaagtacagcaaagagaagacattaaagtggctggaaaaaaaggttaatcaaactgtggcagcattaaaaaccaataatgtgaatgtcagttcccgggtacagtcaactgcatttttctctggtgaccaagcttccactgacaaggaagaggattatattcgttatgcccatggtctgatatctgactacatccctaaagaattaagtgatgacttatctaaatacttaaagcttccagaaccttcagcctcattgccaaatcctccatcaaagaaaataaagttatcagatgagcctgtagaagcaaaagaagattacactaagtttaatactaaagatttgaagactgaaaagaaaaatagcaaaatgactgcagctcagaaggctttggctaaagttgacaagagtggaatgaaaagtattgataccttttttggggtaaaaaataaaaaaaaaattggaaaggtttgaaactttgaaaataaaatctagcaaaaatatttgctttttacatgtttcagtttgtccttcctgactgttaatgactacctttggttgggggaaggaagaggccaatttcatgttctcttaaacatttctttgcatttggtttttgtgttcctgaacaaaatatgggaaagtgtctaacttcatggctatggccttttggagtctcatctgacataatgaaaagtaatcacttgaagagaattaacatatagcatcatgattttctcaataaactgatgtgtgacaatgtt

SEQ ID NO: 520 - protein, 312 aa, Homo sapien
MAAGVDCGDGVGARQHVFLVSEYLKDASKKMKNGLMFVKLVNPCSGEGAIYLFNMCLQQLLEVKVFKEKHHSWFINQSVQSGGLLHFATPVDPLFLLLHYLIKADKEGKFQPLDQVVVDNVFPNCILLLKLPGLEKLLHHVTEEKGNPEIDNKKYYKYSKEKTLKWLEKKVNQTVAALKTNNVNVSSRVQSTAFFSGDQASTDKEEDYIRYAHGLISDYIPKELSDDLSKYLKLPEPSASLPNPPSKKIKLSDEPVEAKEDYTKFNTKDLKTEKKNSKMTAAQKALAKVDKSGMKSIDTFFGVKNKKKIGKV

SEQ ID NO: 521 - DNA, 762 bp, Homo sapien
cggacctgcagccctggccttccgccaccatggagtacctcatcggtatccaaggccccgactatgttcttgtcgcctccgaccgggtggccgccagcaatattgtccagatgaaggacgatcatgacaagatgtttaagatgagtgaaaagatattactcctgtgtgttggagaggctggagacactgtacagtttgcagaatatattcagaaaaacgtgcaactttataagatgcgaaatggatatgaattgtctcccacggcagcagctaacttcacacgccgaaacctggctgactgtcttcggagtcggaccccatatcatgtgaacctcctcctggctggctatgatgagcatgaagggccagcgctgtattacatggactacctggcagccttggccaaggccccttttgcagcccacggctatggtgccttcctgactctcagtatcctcgaccgatactacacaccgactatctcacgtgagagggcagtggaactccttaggaaatgtctggaggagctccagaaacgcttcatcctgaatctgccaaccttcagtgttcgaatcattgacaaaaatggcatccatgacctggataacatttccttccccaaacagggctcctaacatcatgtcctccctcccacttgccagggaacttttttttgatgggctcctttatttttttctactcttttcaggcgcactcttgataaatggttaattcagaataaaggtgactatggatataatt

SEQ ID NO: 522 - protein, 201 aa, Homo sapien
MEYLIGIQGPDYVLVASDRVAASNIVQMKDDHDKMFKMSEKILLLCVGEAGDTVQFAEYIQKNVQLYKMRNGYELSPTAAANFTRRNLADCLRSRTPYHVNLLLAGYDEHEGPALYYMDYLAALAKAPFAAHGYGAFLTLSILDRYYTPTISRERAVELLRKCLEELQKRFILNLPTFSVRIIDKNGIHDLDNISFPKQGS

SEQ ID NO: 523 - DNA, 1460 bp, Homo sapien
ccagatctggaggtgtgtccatggcggcgcttgacctgcgagcggagctggattcgctggtcctgcagctgcttggggacctggaggagctggaggggaaacgaacggtgttgaacgcccgggtggaggagggctggctctcgctcgccaaggctcgctacgcgatgggcgccaagtcggtagggcccctgcagtatgcttcccacatggagccccaggtctgcctccacgccagcgaggcccaggagggactccagaagttcaaggtggtgagagctggtgtccacgccccagaggaggtggggcctcgcgaagcaggtctgcggaggcgcaagggccccactaagaccccagaaccggagtcctctgaggcccctcaggaccccctgaactggtttggaatcctagttcctcacagtctacgtcaggctcaagcaagcttccgggatggcctgcagctggccgcagacatagccagcctccagaaccgcattgactggggtcgaagccagctccggggactccaagagaaactcaagcagctggagcctggggctgcctgacatgcgcgcaaagaggcagggcagcgagcacagctgttctccgacatggctacgtgatctcaggccttcttccttcacaattagctcttgcccctaccccacgccagctaatgccccttctgtgtccctgctctgcatgtttccattttccttaggtgtgaagtttgaagaggcaaacagtaattttgaaagccactactttgaaaccattctaaggcctgagttcccataggacacactcacataggcaggtacacgttagtcaacaattggaactgcctcttggatcactcagctgtgctttcatggctggatgatggaacactgtgcgaagagagatgggggccaggaagtagcgcttcatgcttagtacatcctccaaattgtctttgctggaggagaaaaccgtactcagccaaaagatcaggacaatatgacttgagtccacaaggacacaaacacctgagtagctgggcagcccttggcagggtctaagccaggaagtaaaaatgatctggcctagatatttaagggaactctaggaagaggcctaggtttttaaaatcctgtctctttgtcttaccataagaggctgagcctctcttcatttttttgaagggccacttgtgttttctgttctgggaacttcattcatttttctactgggttgttgatctttgcagtaatttctaggagctgtttatgtttggaggtaattggtcctttgtccatatatatgagatgtaagtcttattttccagtttatctttttgcttattttttttgactttttattgtaaaataaaacatcaaactgcacagaacagttgaatagcttaatgaataactacagtaaaagctatggtaaccactacccaaaaaaaaaaaaaaaaaaaa

SEQ ID NO: 524 - protein, 132 aa, Homo sapien
MGAKSVGPLQYASHMEPQVCLHASEAQEGLQKFKVVRAGVHAPEEVGPREAGLRRRKGPTKTPEPESSEAPQDPLNWFGILVPHSLRQAQASFRDGLQLAADIASLQNRIDWGRSQLRGLQEKLKQLEPGAA

SEQ ID NO: 525 - DNA, 666 bp, Homo sapien
tggaggtgagaaaacagagcagcgtatggcaaaatagtctaagaacaagtagtaaaagcatcagcatcaaaaactccaggctataaaagactaggctcagaaagtgcagttttccacccacagctggggtgcttccaatagcatccttgagacagactccgctctagtacctccagcgaggagttcactactgcaacaagcagcccattcttggatttttattttttttaacttccattttttcttatacatcaagttctcactcctttatatttgatgacatgcacgttcagaactgctgaatatttccccttttatccatgccttcactgctcaatcacctttatacagtttctttacggcagcagtgaaagaagtgactcagaagacccgtctttgaaaaaacaaactataaaatgtatccactctgaccaaagcaaaaaaagacatattccttcccctctccacacagaaaaattcgggatattgagatctccctaaaggaggtcctaaaaagtcagtatatgttggggtaagaagagaagatgcacgccctaagtagagataaaaagagccagattttaaaactctttgttccctaactccttgtatgtaatgctcttattgaaaatgttaaccgattattttgaatgattatttttttgg

SEQ ID NO: 526 - protein, 74 aa, Homo sapien [sequence omitted]

SEQ ID NO: 527 - DNA, 462 bp, Homo sapien
atggcgtcctatttcgatgaacacgactgcgagccgtcggaccctgagcaggagacgcgaaccaacatgctgctggagctcgcaaggtcacttttcaataggatggactttgaagacttggggttggtagtagattgggaccaccacctgcctccaccagctgccaagactgtggttgagaacctccccaggacagtcatcagaggctctcaggctgagctcaagtgccccgtgtgtcttttggaatttgaggaggaggagactgccattgagatgccttgccatcaccttttccattccagctgcattctgccctggctaagcaagacaaattcctgtcccttgtgccgctatgagctgcccactgatgacgacacttatgaggagcacagacgagataaggctcgaaaacagcagcagcaacaccgactggagaacctccatggagccatgtacacgtga

SEQ ID NO: 528 - protein, 153 aa, Homo sapien
MASYFDEHDCEPSDPEQETRTNMLLELARSLFNRMDFEDLGLVVDWDHHLPPPAAKTVVENLPRTVIRGSQAELKCPVCLLEFEEEETAIEMPCHHLFHSSCILPWLSKTNSCPLCRYELPTDDDTYEEHRRDKARKQQQQHRLENLHGAMYT

SEQ ID NO: 529 - DNA, 2080 bp, Homo sapien
gtattcaatatgcttatgttttatttatgtaggtggcatttaaaatacatgatgtgtttagggttacattgtccacagaaagcatcaaataccactcctctccccgccaaaaccaaataaacaaagccaactctttggcaacagttgtgttaaataaaatcccaggtcacacttgtttctggctcccaagcctgggtcactgctacatggattgcgccaaaaaattcccagcttcaacactgctagattaaaattgctggcatttttaaatcacagcaaagcttttcacaatgccctcaagtccaagaggacaaaggagaaagcaacatgaacggcagatcctcatgtgaaagggaaggaaagtcactgggagggagcatgcagggaagaagtcaaggcagccctggaattctactccgtgctcaataaaaaaaaaacgtgaagaagcaatacatcatgcaaacgaaataatgaccggaagtgggcgcatctagttagaatgaagtgactttcgtaaggagtcaatgttcgcgaactgaaacatgagttcaacctccttgtgccgtctctgggtgttttgcacgtgtgtaaataccggcccgttttccccagcatggccctaacccatggacactagggagggtgccactgagcaaaaattttttgctaaaaataattagcaaaaatccaagaaaaaaatatggaatctagcaaaacctacaccatatttgaagttgaatttgcactacctgcaaagcaaataatttaaaagaataaacattgtgaacatcaattcccatcacagcaagccctggatgaaaacatggacctcttggaaggtataactggctttgaagactctgtccgaaagtgtaagtccctctctgaggctgggctccccaaggggaaggggtagggagtggcagccaggtccggggggacagctgctcaccggttttgtctctgacctccacagttatctgccatgttgtgggtatcacttaccagcacattgaccgctggctgctggccgagatgctcggggatctgtcgggtaacgccctctgggtcctggtgcacatctgggaggttgggggtggctagggcagtggacctcagtcagctcctccaacaggcctgtctgggtctcatcaggtcagcatggaaggcccagcccaaggaggaaataagaacttggtataagacagtctctgccttgagggagatcctatgccatttgctcatttattttgcattaattgagtgcctaccgtgtgtcagtgtgctaaactgggcgtgcagcagtaaacaaagtgggatggctccaattcattctcatggaggtagcaaagcacatggcgacatggaggtgtccagtggtgattcctgtcatgaaggaaagcaagacagctcacagaccagcggcatctgagcccttacctccgtagagagaggcccgtggcctgaggtagtgcagaggaggatagtagagcagggccctgacttgtaacgttcatgggtagccagggtgtatgtggccagagcagagtaagcatgggcgaaagtagagagctgggggttggaggggcatttccaggtcatgtggggcctcgggaggaccttgtcctttcccctgactgagaaggagccaccggagggctctgagcagggtagggctctgatcagatggatattttttaaagatccccccaagaacaaaaaaagaaaaaataacttatttgcttacttttgtaaaaagaaacgtagaaaaggaagtcaagaaactaaggaaggccgggtgcggtggctcccgcctgtaatccagcactttgggaggccgaggtgggcggatcatctgtggtcaggagttcgagaccagcctgcccaacgtggtaaaaccccctctctactaaaaatacaaaaaattgctgggtgtggtggcgtgcacctgtagtcccggctacttgggaggctgaggcaggagaattgcttcaacgcaggaggcggaggttgcagtgagctgagatcgcaccattgcactagtgataagatcgaaactccatctaaaaaaaaaaaaaaa

SEQ ID NO: 530 - protein, 148 aa, Homo sapien
MLWVSLTSTLTAGCWPRCSGICRVTPSGSWCTSGRLGVARAVDLSQLLQQACLGLIRSAWKAQPKEEIRTWYKTVSALREILCHLLIYFALIECLPCVSVLNWACSSKQSGMAPIHSHGGSKAHGDMEVSSGDSCHEGKQDSSQTSGI

SEQ ID NO: 531 - DNA, 1464 bp, Homo sapien
agtaccgggtacgcaggggtgcctcaaccacactccgtccacggactctccgttattttaggaggtccctggccaaagatttatttctcttgacaaccaagggcctccgtctggatttccaaggaagaatttcctctgaagcaccggaacttgctactaccagcaccatgccctaccaatatccagcactgaccccggagcagaagaaggagctgtctgacatcgctcaccgcatcgtggcacctggcaagggcatcctggctgcagatgagtccactgggagcattgccaagcggctgcagtccattggcaccgagaacaccgaggagaaccggcgcttctaccgccagctgctgctgacagctgacgaccgcgtgaacccctgcattgggggtgtcatcctcttccatgagacactctaccagaaggcggatgatgggcgtcccttcccccaagttatcaaatccaagggcggtgttgtgggcatcaaggtagacaagggcgtggtccccctggcagggacaaatggcgagactaccacccaagggttggatgggctgtctgagcgctgtgcccagtacaagaaggacggagctgacttcgccaagtggcgttgtgtgctgaagattggggaacacaccccctcagccctcgccatcatggaaaatgccaatgttctggcccgttatgccagtatctgccagcagaatggcattgtgcccatcgtggagcctgagatcctccctgatggggaccatgacttgaagcgctgccagtatgtgaccgagaaggtgctggctgctgtctacaaggctctgagtgaccaccacatctacctggaaggcaccttgctgaagcccaacatggtcaccccaggccatgcttgcactcagaagttttctcatgaggagattgccatggcgaccgtcacagcgctgcgccgcacagtgccccccgctgtcactgggatcaccttcctgtctggaggccagagtgaggaggaggcgtccatcaacctcaatgccattaacaagtgccccctgctgaagccctgggccctgaccttctcctacggccgagccctgcaggcctctgccctgaaggcctggggcgggaagaaggagaacctgaaggctgcgcaggaggagtatgtcaagcgagccctggccaacagccttgcctgtcaaggaaagtacactccgagcggtcaggctggggctgctgccagcgagtccctcttcgtctctaaccacgcctattaagcggaggtgttcccaggctgcccccaacaactccaggccctgccccctcccactcttgaagaggaggccgcctcctcggggctccaggctggcttgcccgcgctctttcttccctcgtgacagtggtgtgtggtgtcgtctgtgaatgctaagtccatcaccctttccggcacactgccaaataaacagctatttaaggggg

SEQ ID NO: 532 - protein, 364 aa, Homo sapien
MPYQYPALTPEQKKELSDIAHRIVAPGKGILAADESTGSIAKRLQSIGTENTEENRRFYRQLLLTADDRVNPCIGGVILFHETLYQKADDGRPFPQVIKSKGGVVGIKVDKGVVPLAGTNGETTTQGLDGLSERCAQYKKDGADFAKWRCVLKIGEHTPSALAIMENANVLARYASICQQNGIVPIVEPEILPDGDHDLKRCQYVTEKVLAAVYKALSDHHIYLEGTLLKPNMVTPGHACTQKFSHEEIAMATVTALRRTVPPAVTGITFLSGGQSEEEASINLNAINKCPLLKPWALTFSYGRALQASALKAWGGKKENLKAAQEEYVKRALANSLACQGKYTPSGQAGAAASESLFVSNHAY

SEQ ID NO: 533 - DNA, 1054 bp, Homo sapien
attcaagcctgggccctggaaggaggggtggacagtcccctcccttccagtccagcatgggtctggggaagaggagcagctttgcctggaaggggcctcctaggagggggagcggtggtttctagctcaggctttaggatcagagagcagcagattcaaatcctgacggttttggtaaagtcaattcaatctctccaagactccgtttacttgatctgcgaagtggggataatggtatcacgtcgcagggttgtcaggcggagctggtaggggagctgccccccagagcagcatggatgccccgcgaagggacatggagttgctcagcaacagcctggctgcctacgcgcacatccgcgccaaccccgagagctttggcctctacttcgtgctgggcgtctgcttcggcctgctgctcaccctctgcctgctcgtcatcagcatctcgtgggcgccccgcccgcggccccggggcccggctcagcgccgggacccccgcagcagcaccctggagcccgaggacgacgacgaggacgaggaggacacggtgactcggctgggccccgacgacacgctgccgggccccgagctgtccgcagagccggacgggcccctcaacgtcaacgtcttcacgtcggcggaggagctggagcgggcgcagcggctggaggagcgcgaacggatcctgcgggagatctggcgcaccgggcagccggacctgctgggcacaggcacgctggggcccagccccacggccacgggcaccctgggccgcatgcactattactgatgggccctggctcccgccgcaaggcgctcggggtaccggacctgtacatgagctcagagctaccccacaccttcggactgcctcggcccccacagctcccaggtgctactgggcgtggaccgccaccccctgagaggctcccttccccagtcctgccagaagaccccgggggcggggagggggcagcatgcagggtccccactccctctctggggtcgatgaagaggtgaagtgaccaaatgaaagaaagctgcattctcagtg

SEQ ID NO: 534 - protein, 165 aa, Homo sapien
MDAPRRDMELLSNSLAAYAHIRANPESFGLYFVLGVCFGLLLTLCLLVISISWAPRPRPRGPAQRRDPRSSTLEPEDDDEDEEDTVTRLGPDDTLPGPELSAEPDGPLNVNVFTSAEELERAQRLEERERILREIWRTGQPDLLGTGTLGPSPTATGTLGRMHYY

SEQ ID NO: 535 - DNA, 607 bp, Homo sapien
ggactgttgaagacaggtctccacacacagctccagcagccacatttgcaaccttggccatctgtccagaacctgctcccacctcaggcccaggccaaccgtgcactgctgcaatgggctctgagctggagacggcgatggagaccctcatcaacgtgttccacgcccactcgggcaaagagggggacaagtacaagctgagcaagaaggagctgaaagagctgctgcagacggagctctctggcttcctggatgcccagaaggatgtggatgctgtggacaaggtgatgaaggagctagacgagaatggagacggggaggtggacttccaggagtatgtggtgcttgtggctgctctcacagtggcctgtaacaatttcttctgggagaacagttgagcagacagccacattgggcagcgcccttcctctccaccctcccagacctgcctcttccccctgcttccacctcaccccacttatccctctccataaccccacccttgcccaccccacccccacccccaccaagggcgcaagagtagcggtccaagcctgcaactcatctttcattaaaggcttctctctcaccagcaaaaaaaaaaaaa

SEQ ID NO: 536 - protein, 94 aa, Homo sapien
MGSELETAMETLINVFHAHSGKEGDKYKLSKKELKELLQTELSGFLDAQKDVDAVDKVMKELDENGDGEVDFQEYVVLVAALTVACNNFFWENS

SEQ ID NO: 537 - DNA, 3166 bp, Homo sapien
gtcctccggggattagagccggtgggctcgttgtgggcgccatttctcggcgtctcccgaggagccgcccctttctcagccttgctcggctcttccccgctctggtcgccggggctgcgccgtccccagctcagtgacaaaaatgctgagtttcttccgtagaacactagggcgtcggtctatgcgtaaacatgcagagaaggaacgactccgagaagcacaacgcgccgccacacatattcctgcagctggagattctaagtccatcatcacgtgtcgggtgtcccttctggatggtactgatgttagtgtggacttgccaaaaaaagccaaaggacaagagttgtttgatcagattatgtaccacctggacctgattgaaagcgactattttggtctgagatttatggattcagcacaagtagcacattggttggatggtacaaaaagcatcaaaaagcaagtaaaaattggttcaccctattgtctgcatcttcgagttaagttttattcctcagaaccaaataaccttcgtgaggagctaacccggtatttatttgttcttcagttaaaacaagatattctcagtggaaaattagactgtccctttgatacagcagtgcaattggcagcttataatctgcaagctgaacttggtgactatgatcttgctgagcatagtcctgaacttgtctcagagttcagattcgtgcctattcagactgaagagatggaactggctatttttgagaaatggaaggaatacagaggtcaaacaccagcacaggctgaaaccaattatctgaataaagccaaatggctagaaatgtatggggttgatatgcatgtggtcaaggctagagatgggaatgactatagtttgggactaacaccaacaggagtccttgtttttgaaggagataccaaaattggcttatttttttggccgaagataaccagattggattttaagaagaataaattaaccttggtggttgtagaagatgatgatcagggcaaagaacaggaacatacatttgtctttagactggatcatccaaaagcatgcaaacatttatggaaatgtgctgtggagcatcatgctttcttccgccttcgaggccccgtccaaaagagttctcatcgatcaggatttattcgactaggatcacgatttagatatagtgggaaaacagagtatcagaccacaaaaaccaataaagcaagaagatcaacatcctttgaaagaaggcccagcaaacgatattctagacgaactctacaaatgaaagcatgtgctacaaaacctgaagaacttagtgttcacaataatgtttcgacccaaagtaatggctcccaacaggcttgggggatgagatctgctctgcctgtgagtccttccatttcctctgctcctgtgccagtggagatagagaatcttccacagagtcctggaacagaccagcatgacaggaaatgcattcctctgaatattgatttgctgaatagcccagacttattggaaacaacgattggtgatgtaattggggcatctgacactatggaaacatcccaagcactgaatgacgttaatgtagccaccaggcttccgggattaggggaacctgaagttgaatatgagacattaaaagacacctcagagaagctcaaacagcttgagatggagaacagtcctttgctgtcccctcgatccaacatcgatgttaacataaacagccaggaggaagtggtgaagttgactgagaaatgccttaataatgtcattgagagcccaggattgaatgtcatgagagttcctcctgacttcaagagtaacattttgaaggctcaagtagaagcagtgcataaggttacaaaagaagatagcttattaagtcataaaaatgccaatgttcaggatgctgccacaaacagtgctgtgttaaatgagaataatgtgcccctccccaaagagtctcttgagactctgatgcttatcacacctgccgacagtggttctgttctaaaggaagctacagatgaattggatgccttgcttgcatctctaactgagaatctaattgatcacacagttgcacctcaggtgtcttccacatccatgatcacaccccggtggattgttccgctctggtcccattttggcagaagaagctgtcctgaagcagaagtgtttactgaccactgagctctgagggcctgtagctggaatacgcatctctccagcattccgtcctgggatccgtttcagctagaatatgttggattcaggagcttgtccattatttgtaggtaaaaaaagctgcacgtagatttgacttcaactccgtaaaaaagacagctgtattttccgtccaactggaattgttgaatcacactgcatagctgcccaaaagagagtgtttggtcttgaactttctatacttttataaatgttacaaattcccgaaagaagggaatttctttttctggggtttccttcaaactcttggctccacctagcggttctatttgttcataacaacttcataacaagcctgcctctggtagtcaacagccttttgaaagctatttccatctagtatcagggtgagagcatccttgatctggctgcctgttagagaaattgcacttttcctgacttacctagaaatcaagaatttaggaaattaatgtggacactataaaggcagacttagggccaactttttttttttttacaattattacaacactaaagagaagtttagaatatagagagtttttaaatgtctcccattcttttgatttcttactgtactggctatcttaatatttcaagtttacatcaagataaaccctgagaagaactacggagaaatcaaataaaatcctgtcatatttttttcaccctgcctttccacaggaagcactcacaggcaccacacacgtatcatgtaacttatcagtggggtgggttactgttgaagagaccctggggcatttacctcaggcatctgcactcctccgagcccggtggagaatgcaggctgctgtagtctcaggtaatgaaggcacagcacagcagtactccacattgtttcctatttggacatagacttcatttcctttcagtataagctgagtaaatttagagctttcaaactgg

SEQ ID NO: 538 - protein, 687 aa, Homo sapien
MLSFFRRTLGRRSMRKHAEKERLREAQRAATHIPAAGDSKSIITCRVSLLDGTDVSVDLPKKAKGQELFDQIMYHLDLIESDYFGLRFMDSAQVAHWLDGTKSIKKQVKIGSPYCLHLRVKFYSSEPNNLREELTRYLFVLQLKQDILSGKLDCPFDTAVQLAAYNLQAELGDYDLAEHSPELVSEFRFVPIQTEEMELAIFEKWKEYRGQTPAQAETNYLNKAKWLEMYGVDMHVVKARDGNDYSLGLTPTGVLVFEGDTKIGLFFWPKITRLDFKKNKLTLVVVEDDDQGKEQEHTFVFRLDHPKACKHLWKCAVEHHAFFRLRGPVQKSSHRSGFIRLGSRFRYSGKTEYQTTKTNKARRSTSFERRPSKRYSRRTLQMKACATKPEELSVHNNVSTQSNGSQQAWGMRSALPVSPSISSAPVPVEIENLPQSPGTDQHDRKCIPLNIDLLNSPDLLETTIGDVIGASDTMETSQALNDVNVATRLPGLGEPEVEYETLKDTSEKLKQLEMENSPLLSPRSNIDVNINSQEEVVKLTEKCLNNVIESPGLNVMRVPPDFKSNILKAQVEAVHKVTKEDSLLSHKNANVQDAATNSAVLNENNVPLPKESLETLMLITPADSGSVLKEATDELDALLASLTENLIDHTVAPQVSSTSMITPRWIVPLWSHFGRRSCPEAEVFTDH

SEQ ID NO: 539 - DNA, 807 bp, Homo sapien
ccacccgcctcgcctcccacgtgatggactatagacatgagccatcgtgcttggccttcttgattcttgaatacggggttttgaggtgaaagcatttcatgaaaacttaagttcatacacaagagcatcatgaatattctaaaagaggtatctgtgctttttttgtgaccacaaaatattacttcttatgaaatgtttacactaggtgaggaaaagttcattaattacctttaaaccgttccttattttttttaagattttaaattgtattttggcttttgcctccagtatcctttctggttgctctggtttgaattaagttcctattatgctgcagcacatatcaaccttccctaagtaaccatttcctggaatgtgaagcatcggtgccattagcagaccatatgcagaaatgtcgtgtacttgcatttcttttttgtgcactctataaggctggttgtgactcagatcagcttaactttttatattatgttatttcactaactgctacagtcaaaatgatcaaatctttgtacaatagaaaattatttaaattttatttttctactgacatttctaattctagtgtaaatgtttatcaataaaaaattactttcaattctgagttggaattatatttctttttggtggctaatgagtttaatcttttgtaataaaattgacttcagttttcattttttaaataacttaatatctagcatgtgtaactttttttatgttctacttcttactaatttatgataaaattcttgttcaaagttgtgattaaaccgtacttaacatgta

SEQ ID NO: 540 - protein, 16 aa, Homo sapien
MIKFLFKVVIKPYLTC

SEQ ID NO: 541 - DNA, 791 bp, Homo sapien
gcatgtcatggccgcctccatggcccggggaggcgtgagtgccagggttctgctgcaggctgccaggggcacctggtggaacagacctgggggcacttccgggtcgggggagggggtggcgctggggacaaccagaaagtttcaagcgacaggctcgcgcccggcgggagaggaggacgcgggcggcccggagcggcccggggacgtggtgaacgtggtgttcgtagaccgctcaggccagcggatcccagtgagtggcagagtcggggacaatgttcttcacctggcccagcgccacggggtggacctggaaggggcctgtgaagcctccctggcctgctccacctgccatgtgtatgtgagtgaagaccacctggatctcctgcctcctcccgaggagaggagaactcgcggctgggctgccagattgtgctgacaccggagctggaaggagcggaattcaccctgcccaagatcaccaggaacttctacgtggatggccatgtccccaagccccactgacatgaacacctggaccattccacattgccatggccccagggcccagattgagggaatagccaggtgccagccctgcccagagtgcggacaggcccgggagagacgtggaagcccctgtgaaggacaacacccctgcttgggagagagtcccatgtccaggctctggtggggacagggcccctagtggggtggccttccccaggcccctgagaatcagggtttgagtaggagtggactcatattggagctgcaataaatcaataacacag

SEQ ID NO: 542 - protein, 144 aa, Homo sapien
HVMAASMARGGVSARVLLQAARGTWWNRPGGTSGSGEGVALGTTRKFQATGSRPAGEEDAGGPERPGDVVNVVFVDRSGQRIPVSGRVGDNVLHLAQRHGVDLEGACEASLACSTCHVYVSEDHLDLLPPPEERRTRGWAARLC

SEQ ID NO: 543 - DNA, 5656 bp, Homo sapien
cgccggcgggccgtgtgtgaggagcagtagagaactgtggactattctgcttggaaggtcagctctgagagagctgagtcagattgaggcagaactgaataaacattggcggcgattgttagaggggctttcttactacaaacctcccagtccaagttcagctgaaaaagtgaaagctaataaagatgtagcttcaccattgaaggaactgggtttaagaatcagcaagtttttgggtcttgatgaagaacagagtgtgcagttactccagtgttacctgcaagaggactacaggggtactcgggactcagtaaagacagtactgcaagatgagaggcagagccaggccttaatcctgaagattgcagattattattatgaagaaagaacctgtattcttcgttgtgtcttacaccttctcacttacttccaagatgaaagacacccctatagggttgaatatgcagactgtgttgataaattggagaaggaactagtttcaaaatacagacagcagttcgaagagctttataaaactgaagcaccaacttgggagacacatggaaatctcatgacagagcgccaagtgtctcgctggtttgttcagtgccttcgggaacagtccatgctgctagaaattattttcctttattatgcatactttgagatggcacccagtgacttacttgtattaaccaagatgtttaaagagcaaggatttggtagtaggcagaccaataggcacctggtggatgagactatggatccttttgtagatcggattggctacttcagtgccctcatcctggtggagggcatggatatcgagtccttgcataagtgtgctttggatgacagaagagaactgcatcagtttgcgcaggatgggcttatttgtcaggatatggactgtttaatgttgacctttggggacattccacatcatgccccagtgcttttggcctgggctctcctccgtcacactctgaacccagaagagacaagcagtgtggtccggaagataggtggcacagccatccagctgaatgtgtttcagtacttgacccgattgctccagtcccttgccagtgggggaaatgattgcaccaccagcactgcatgcatgtgtgtctatggactgctctctttcgttctgacctcgttggagctgcacaccctgggcaatcagcaggatataattgatacagcatgtgaagtattggccgacccttctcttccggaactgttctggggaacagagccaacttctggccttgggatcattctggacagtgtgtgtggaatgtttccccaccttctctccccactcctgcaactgctccgagccctggtatcagggaagtccacagccaaaaaggtgtatagcttcttggataagatgtctttctacaatgaactttataaacacaagcctcatgatgtgatctcccatgaagatggaactctttggcggagacaaacacccaaactcctttatccccttgggggtcaaaccaaccttcgcatacctcaaggcactgtgggccaagtaatgttggatgatagggcatacctggtacgctgggaatactcctatagcagctggaccctctttacctgcgagattgaaatgttgcttcatgttgtttcaactgcagatgtgattcagcactgccagcgagtcaaacccatcattgatctcgtccataaggtcatcagtacagacctgtcgatagcagactgtctcctgcccatcacatctcgcatctacatgctgctgcagcggttaacgacagtgatctccccacctgtggatgtcattgcttcttgtgtcaactgcttaactgttttggctgcccgcaatccagcaaaggtctggactgatcttcgtcacacaggttttttaccatttgtggcccatcctgtctccagcctgagtcagatgattagtgcggaagggatgaatgctggagggtacggaaacctcttgatgaacagtgaacagcctcagggcgagtatggggttactattgcctttctgcgcttgatcaccacccttgtcaaggggcaacttggtagtacccagagccaaggacttgtaccctgtgtaatgtttgtgctgaaggagatgcttcccagctaccataagtggcgctacaactctcatggagtgagggaacagattggttgcctgatcttggagctgattcatgcgatactgaacctgtgccacgagacagacctgcacagcagtcatactcccagcctgcagtttctctgcatctgcagcctggcatacacagaagcaggacagacagttatcaatatcatgggcattggcgtggacaccattgacatggtgatggctgctcagcctcgaagtgatggggcagagggccaggggcagggccagctgctgatcaagacagtgaaactggcattctccgtcaccaacaatgttattcggctgaaacctccttctaatgtggtgtcccccctggaacaggctctctcacaacatggtgctcatggaaacaacctcattgctgttctagccaaatacatctaccacaaacatgaccctgctttgccacgtcttgccattcagctgctgaaacgtctggccacggtggccccaatgtcagtgtatgcttgtctgggcaatgatgcggctgccattcgtgatgccttcctgacccgattgcagagcaaaattgaggacatgcgcatcaaagtcatgattctagagttcctcactgttgcagtagagacccagccaggcctcatcgaactgtttctgaacctggaagttaaggatggcagtgatggctcaaaggaattcagccttgggatgtggagctgtctccatgcagtgctggagctgattgattcccaacagcaagatcgatactggtgcccacccctgctgcatcgtgccgccattgcctttttgcatgctctgtggcaggatcggagggacagtgccatgctggtcctccgaaccaaacccaagttttgggaaaatttaaccagtccgctgtttggaaccctttctcctccctctgaaacatcagagcccagcatcctggaaacctgtgccctaatcatgaagataatttgcttggagatatactatgtagtaaagggttcattagaccagtcattaaaggatacactgaagaaattttccatcgagaaacgctttgcctactggtcagggtatgtcaagtcattggcagttcacgtggccgaaacagaaggcagcagctgcacctccttgttagagtaccagatgctggtgtccgcctggaggatgcttctcatcattgccaccactcatgcagatataatgcacctgactgactctgtggtgcgtcgccagctctttcttgacgtgcttgatggaaccaaagcattactcctagttccagcctcagtgaactgccttcgccttggctccatgaagtgcactctgctgcttatcctcctccggcagtggaagagagagttaggttctgtggatgaaatccttggacccttgacggagatcctggagggagtgctgcaggccgaccagcaactcatggagaagaccaaggccaaggtgttctcagcattcatcacagtgttgcaaatgaaggagatgaaagtaagtgacatcccccagtactcccagctggtgctgaatgtctgtgagaccctccaagaggaagtgattgcactcttcgaccagacccgccacagtctggcattaggcagtgccacagaggacaaggacagcatggagactgacgactgttctcggtcccggcacagggaccagcgtgatggggtgtgtgtcctgggcctgcacctggccaaggagctgtgtgaggtagacgaggatggtgactcctggctgcaggtaacccgcaggctccccatcctacccaccctcctcaccactctagaggtgagccttcgcatgaagcagaacctgcatttcactgaggccacattgcatctgctcctcaccctggctcgcactcagcagggagccacagcagtggctggagctggcatcacccagagcatttgtttgccccttctgagtgtgtaccagctgagcaccaacggcacagcacagacacctagtgcctctcggaagtccctggatgccccctcttggccaggagtctaccgcctgtccatgtccctgatggagcagctgctcaaaactctgcgctacaacttcctgcctgaggccctggacttcgtgggtgtccaccaggagcggaccttacagtgcctcaacgcagtgaggacagtgcagagtctggcctgcctggaggaggcggaccacaccgtgggttttattctgcagctctctaacttcatgaaggagtggcacttccacctgcctcagctcatgcgtgatatccaggtcaacctgggttacttgtgccaggcatgtacctctctcctgcacagtcgaaagatgctgcagcattacttacagaacaaaaatggggatggcctcccctcagctgttgcccagcgagtccagaggccaccgtctgctgcttctgctgccccctcctcctcaaagcagcccgctgctgacacagaggcatcagagcagcaggccttgcacacagtccagtatggccttctcaagatcctcagcaagacgctggcagccctgcgccacttcaccccagatgtctgccagattctgctggatcagtccctggaccttgctgaatacaacttcctgtttgccctgagctttaccactcccacctttgactccgaagtggccccctccttcgggacccttctggccacagtgaatgtggccctcaacatgcttggagagctggacaagaaaaaggagcccctcacccaggcagtggggctcagcacacaggcagaagggaccaggacgttaaagtccctcctgatgtttaccatggaaaactgcttctacctgctcatctctcaggcgatgcggtaccttagggacccggctgtgcacccccgggacaaacagcggatgaagcaggagctcagctctgagttgagcacgctgctgtccagcctctcgcgctacttccgccggggagcccccagctcccctgccactggtgtcctcccctcgccgcagggcaagtccacctctctctccaaagccagccctgagagtcaggagcctctgatccagttggtgcaggcgtttgtccggcatatgcaaagatagggcagtgctgttctgcccacctacccctctccaccagcctacactgcaccctggctggcaggggtgctgctggctgctagggcctatacaatggagggcacctcctgtcacccccctcccggagtagccacgactccagccaccacccactgacgttatttttatactagatgaagaggtcaacagcaggcatggggagccgagtcttctgtgctcaggtcctcacgctgcagacgccccctagaggaactttccttcctttccagcattccccacagcactgccggccaggggagaggcggcagcccagcagagggctctatgcacgggtttcaaacctgttttccacactctgtctttgcagttttggtaattctgtggtctatttatacagatattaaaatcttgtttatagac

SEQ ID NO: 544 - protein, 1745 aa, Homo sapien
AGGPCVRSSRELWTILLGRSALRELSQIEAELNKHWRRLLEGLSYYKPPSPSSAEKVKANKDVASPLKELGLRISKFLGLDEEQSVQLLQCYLQEDYRGTRDSVKTVLQDERQSQALILKIADYYYEERTCILRCVLHLLTYFQDERHPYRVEYADCVDKLEKELVSKYRQQFEELYKTEAPTWETHGNLMTERQVSRWFVQCLREQSMLLEIIFLYYAYFEMAPSDLLVLTKMFKEQGFGSRQTNRHLVDETMDPFVDRIGYFSALILVEGMDIESLHKCALDDRRELHQFAQDGLICQDMDCLMLTFGDIPHHAPVLLAWALLRHTLNPEETSSVVRKIGGTAIQLNVFQYLTRLLQSLASGGNDCTTSTACMCVYGLLSFVLTSLELHTLGNQQDIIDTACEVLADPSLPELFWGTEPTSGLGIILDSVCGMFPHLLSPLLQLLRALVSGKSTAKKVYSFLDKMSFYNELYKHKPHDVISHEDGTLWRRQTPKLLYPLGGQTNLRIPQGTVGQVMLDDRAYLVRWEYSYSSWTLFTCEIEMLLHVVSTADVIQHCQRVKPIIDLVHKVISTDLSIADCLLPITSRIYMLLQRLTTVISPPVDVIASCVNCLTVLAARNPAKVWTDLRHTGFLPFVAHPVSSLSQMISAEGMNAGGYGNLLMNSEQPQGEYGVTIAFLRLITTLVKGQLGSTQSQGLVPCVMFVLKEMLPSYHKWRYNSHGVREQIGCLILELIHAILNLCHETDLHSSHTPSLQFLCICSLAYTEAGQTVINIMGIGVDTIDMVMAAQPRSDGAEGQGQGQLLIKTVKLAFSVTNNVIRLKPPSNVVSPLEQALSQHGAHGNNLIAVLAKYIYHKHDPALPRLAIQLLKRLATVAPMSVYACLGNDAAAIRDAFLTRLQSKIEDMRIKVMILEFLTVAVETQPGLIELFLNLEVKDGSDGSKEFSLGMWSCLHAVLELIDSQQQDRYWCPPLLHRAAIAFLHALWQDRRDSAMLVLRTKPKFWENLTSPLFGTLSPPSETSEPSILETCALIMKIICLEIYYVVKGSLDQSLKDTLKKFSIEKRFAYWSGYVKSLAVHVAETEGSSCTSLLEYQMLVSAWRMLLIIATTHADIMHLTDSVVRRQLFLDVLDGTKALLLVPASVNCLRLGSMKCTLLLILLRQWKRELGSVDEILGPLTEILEGVLQADQQLMEKTKAKVFSAFITVLQMKEMKVSDIPQYSQLVLNVCETLQEEVIALFDQTRHSLALGSATEDKDSMETDDCSRSRHRDQRDGVCVLGLHLAKELCEVDEDGDSWLQVTRRLPILPTLLTTLEVSLRMKQNLHFTEATLHLLLTLARTQQGATAVAGAGITQSICLPLLSVYQLSTNGTAQTPSASRKSLDAPSWPGVYRLSMSLMEQLLKTLRYNFLPEALDFVGVHQERTLQCLNAVRTVQSLACLEEADHTVGFILQLSNFMKEWHFHLPQLMRDIQVNLGYLCQACTSLLHSRKMLQHYLQNKNGDGLPSAVAQRVQRPPSAASAAPSSSKQPAADTEASEQQALHTVQYGLLKILSKTLAALRHFTPDVCQILLDQSLDLAEYNFLFALSFTTPTFDSEVAPSFGTLLATVNVALNMLGELDKKKEPLTQAVGLSTQAEGTRTLKSLLMFTMENCFYLLISQAMRYLRDPAVHPRDKQRMKQELSSELSTLLSSLSRYFRRGAPSSPATGVLPSPQGKSTSLSKASPESQEPLIQLVQAFVRHMQR

SEQ ID NO: 545 - DNA, 1912 bp, Homo sapien
ctattttagtacaagtgaaacagcctcgaaaaaaggtcatggcttgcaaaaccgcttttaataaaaccgggttccaagaagtgtttgatcctcctcattatgaactgttttcactaagggacaaagagatttctgcagacctggcagacttgtcggaagaattggacaactaccagaagatgcggcgctcctccaccgcctcccgctgcatccacgaccaccactgtgggtcgcaggcctccagcgtcaaacaaagcaggaccaacctcagttccatggaacttcctttccgaaatgactttgcacaaccacagccaatgaaaacatttaatagcaccttcaagaaaagtagttacactttcaaacagggacatgagtgccctgagcaggccctggaagaccgagtaatggaggagattccctgtgaaatttatgtcagggggcgagaagattctgcacaagcatccatatccattgacttctaatcttctgctaatggtgatgtgaattcttagggtgtgtacgtacgcagcctccagggcaccatactgtttccagcagccaacccttttctcccatcacaactacgaagaccttgatttaccgttaacctattgtatggtgatgtttttattctctcaggcagtctatatatgttaaaccaatcaaggaacttactctattcagtggaaacaataatcatctctattgcttggtgtcatttataggaagcactgccagttaaagagcattagaagaggtggttggatggagccaggctcaggctgcctcttcgttttagcaacaagaagactgctcttgactgataacagctctgtcaatattttgatgccacaataaacttgatttttctttacattccttttatttttcctttctctaaatttaatttgttttataagcctatcgttttaccatttcattttcttacataagtacaagtggttaatgtaccacatacttcagtataggcatttgttcttgagtgtgtcaaaatacagctagttactgtgccaattaagacccagttgtatttcacccatctgtttcttcttggctaatctctgtacttctgccttttaattactgggcccttattccttattttctgtgagaaataatagatgatatgatttattacctttcaattatatttttctcagttatactagaaaatttcataatcctgggatatatgtaccattgtcagctatgactaaaaatttgaaaaagataaaaatttctagcaagcctttgaagtttaccaagtatagtcacattcagtgacagcccattcattccagtaaagaatcatttcattcactttgggagaggcctataattacatttatttgcaatgtttctcttcgctagattgttacatagctcccattctgttggttttgcttacagcatatggtaaccaaggttagatgccagttaaaattccttagaaattggatgagccttgagattgcttcttaactgggacatgacatttttctagctcttatcaagaataacaacttccacttttttttaaactgcacttttgactttttttatggtataaaaacaataatttataaacataaaagctcattgtgttttttagacttttgatattatttgatactgtacaaactttattaaatcaagatgaaagacctacaggacagattcctttcagtgttcacatcagtggctttgtatgcaaatatgctgtgttggacctggacgctataacttattgtaaagaccttggaaatgtggacataagctctttctttccttttgttactgtatttagtttgtgataaatttttcactgtgtgatatttatgctctaaatcactacacaaatcccatattaaaatatacattgtacctg

SEQ ID NO: 546 - protein, 148 aa, Homo sapien
MACKTAFNKTGFQEVFDPPHYELFSLRDKEISADLADLSEELDNYQKMRRSSTASRCIHDHHCGSQASSVKQSRTNLSSMELPFRNDFAQPQPMKTFNSTFKKSSYTFKQGHECPEQALEDRVMEEIPCEIYVRGREDSAQASISIDF

SEQ ID NO: 547 - DNA, 514 bp, Homo sapien
tggtccatcagctgctggttcattatagccttctcttaagtactgaataagacaaaatataaatcttggaagaacaaattcagacatcatcagtaagtctttagggacacagggaatatttgaacttgatttaatttgatgccttttgcaaaacccgctctcccgcatcacgttgctgtccccgcagtcgcaggcgcccccggcctggctgcggaacatgttgaagtcgtgtccggtgtggtcgccctggtggaagcactcggcgcacagcgacatgcagggcgagatgccgcacgtccggcagcggtaggccacgaagttggctgtccagaccaggccgcagagcgccgcgggatcgtaggcccgcaccgccgcgcagaactcgtcgtagccgccgccgcccgccagaaggcacttacaccactccagggcctcctcctcggccgcccccggaccgcccccgcctccggccgccgccgcgtcctcgccgccagcagccgcggccagcggccgc

SEQ ID NO: 548 - protein, 124 aa, Homo sapien [sequence omitted]

SEQ ID NO: 549 - DNA, 1412 bp, Homo sapien
ctccttgggcgatcgcctgggtagaggagaggagtttccggggctcgggtccgggtcgccttccaggggaacgagcgcggaagcaagtgggcggcgagaggcggagcaagagacgctggagggcgtggacgcagcgggctttggaaaggccccaagttaatgaggcgtgcgccggctgccgagcgcctcttggagctgggctttcccccgcggtgcgggcgccaggagccgccttttccgctgggtgtcactcgggggtggggaagatggcccattcaaaagcgccgcgagggggcccggccagtgcccttcagtgagcgctcgcaagaggacggcagaggcccggcagctcggagctccgggaccttgtggcgcatcaggacgcggctgtccctctgccgggacccagagccgccgccgccgctctgcctcctgcgtgttagcctcctctgcgcgctccgggcaggcggccgtgggagccgctggggcgaggacggcgcgaggctgctgctgctgcccccggcccgcgcggctggaaacggagaggccgagccaagcggcggcccctcttatgctgggaggatgctggagagtagcggctgcaaagcgctgaaggagggcgtgctggagaagcgcagcgacgggttgttgcagctctggaagaaaaagtgttgcatcctcaccgaggaagggctgctgcttatcccgcccaagcagctgcaacaccagcagcagcagcaacagcagcagcagcagcagcaacaacagcccgggcaggggccggccgagccgtcccaacccagtggccccgctgtcgccagcctcgagccgccggtcaagctcaaggaactgcacttctccaacatgaagaccgtggactgtgtggagcgcaagggcaagtacatgtacttcactgtggtgatggcagagggcaaggagatcgactttcggtgcccgcaagaccagggctggaacgccgagatcacgctgcagatggtgcagtacaagaatcgtcaggccatcctggcggtcaaatccacgcggcagaagcagcagcacctggtccagcagcagcccccctcgcagccgcagccgcagccgcagctccagccccaaccccagcctcagcctcagccgcaaccccagccccaatcacaaccccagcctcagccccaacccaagcctcagccccagcagctccacccgtatccgcatccacatccacatccacactctcatcctcactcgcacccacaccctcacccgcacccgcatccgcaccaaataccgcacccacacccacagccgcactcgcagccgcacgggcaccggcttctccgcagcacctccaactctgcctgaaaggggcagctcccgggcaagacaaggttttgaggacttgaggaagtggg

SEQ ID NO: 550 - protein, 400 aa, Homo sapien
MRRAPAAERLLELGFPPRCGRQEPPFPLGVTRGWGRWPIQKRREGARPVPFSERSQEDGRGPAARSSGTLWRIRTRLSLCRDPEPPPPLCLLRVSLLCALRAGGRGSRWGEDGARLLLLPPARAAGNGEAEPSGGPSYAGRMLESSGCKALKEGVLEKRSDGLLQLWKKKCCILTEEGLLLIPPKQLQHQQQQQQQQQQQQQQPGQGPAEPSQPSGPAVASLEPPVKLKELHFSNMKTVDCVERKGKYMYFTVVMAEGKEIDFRCPQDQGWNAEITLQMVQYKNRQAILAVKSTRQKQQHLVQQQPPSQPQPQPQLQPQPQPQPQPQPQPQSQPQPQPQPKPQPQQLHPYPHPHPHPHSHPHSHPHPHPHPHPHQIPHPHPQPHSQPHGHRLLRSTSNSA

SEQ ID NO: 551 - DNA, 1398 bp, Homo sapien
  unsure 101-178: unknown base
ggagtcctcatgggaataaggatattacaaatgtaaacaggtacctaagcactccttgatcacgtgacgttgttgaatattttaggcacactttcttttgnnnnnnnnnnnnnnnnnnnnnnnnnnnnnnnnnnnnnnnnnnnnnnnnnnnnnnnnnnnnnnnnnnnnnnnnnnnnnnttgactttcaacaaattgatagtgagcattaagggtttccaagttggatttgtaactcctcatcattccttgtatgacaactttctgaatatatgtcactatgtagtaaaattaaacactccaaactcatctttctgttgttagaagttttcagcggtacttccatgcaactttaaatctcactgctctctatggttgatgtcaaatgaccttcagtaatgactgagaattgaatacaaatagattacaaagccaaaatttgatgttaaatgactcaggaaattttagttgtattttcaattcaagtacttagtagcctacgtttgcttggcctctggttctttatggaaaataggctttgtagtggcattgtggagcaaaggagactgttacaccttaattaactttttttactgatgcaaataatttgaggatagagaggagggaagtagtgaaagctatgacctaaaacattgggaccaaatagaggctcacagatatttggattattttatgtgcttattattaaataaggaaagcattttgtgatatgtggaagacgctatgtgaagttttacctatcttctcaaagaccttttcttttgtattttcttttggtgtttcttaaagccaaacaaagaaatgttcttaaggagacagggtgggtttttctgtgggcctttgttggtttttctgtgggccatcgccctctaatggaattgatctctggctgtttgatttttttcatattgtatttttaaaatttgttgtacagtgccctgtgagcaccaagtaccactagatgaataaaacgtattatatctaaagtcttagtagaccaatttttaatcttagttgactctgtattgttatcacactgcactcttgtggttgtgccatttttgcaaaattgagctctttcggttgttttcgaaataagggaacttagtgttgaaaaaccagagaactttttctttaataagaaactaaaaaagttgcagccacataggttcagtttggctctttggtttccagtggctctcaaatcccctaaggttaaaagaaaacactacagctaccctagggtttctcaaccttggcattattgacatcttgaatcaaataattcattattgtgggggtgctgtcctgtgccttgcagaatcttgagcagtgttcctgacctctacctattgagatgccagcagcacacccccatc

SEQ ID NO: 552 - protein, 44 aa, Homo sapien
MTQEILVVFSIQVLSSLRLLGLWFFMENRLCSGIVEQRRLLHLN

SEQ ID NO: 553 - DNA, 1095 bp, Homo sapien
aagtttgtgataatttgttaggacagcaatagaaaacaaatacaatatacaggttcactcatttaacataatctgccgttttacaaaactgtgattttgaagtttcttgttgcattgaatacacttttttgaagctgatgttgacacaggaataaggcaattgagcaagaacaacaaggcatggtgtgttaattatgcactaaatgaccgtggccattttgtctaatagtttcaatagtttccaatagtttcaagtgtataggttgagggcagggactatatctggtctttatatcttacaatgattttcttatatagttattagcacagtgccagaaatgtttcctgaattaataaatgctaaaacatttcctcattaagactgtaagctgtttggtgtaggaaaactaactttttaaaattgatcataacaattccaacgttgaacatggcctggagcttaacagatgtttatttaaatactaaggagtatgtctgggcttaggaaggagagggtggttacatttcagggtggtagaattctgcctgaaatatctgctttataataaaagtaaaatgtctcaccgatacactgttaaactgagaaaacaaagatgaggtaaggtgggtcagattatttctaaggtctgtttactatttacatttcatataattttcattaaatgtggagaatgcaagtcttaggagtcacctgaggtacatccagttttttgtgactatttcctgatgtttgacagactgttctttcaacttggtgtagagttacagtctactcttttagggagaatgctgtttgttcacatcatgaggctgtaaatatttaaaatgttctcaccattgtgttagtttccaactgacacatggcctgagagattggagtatcattaattctgcaactcttttagtgctcaggatgtgcatgtttatttactttcaggactagttcagacatagtaaaactgctagtgacttcatgtaatccttattctgaactgtatttgaaagcaagggaaatgaaacatgatccctaataacctcaaacatccaaagatcaagtcaattaagggcaaaaaa

SEQ ID NO: 554 - protein, 17 aa, Homo sapien
MIPNNLKHPKIKSIKGK

SEQ ID NO: 555 - DNA, 725 bp, Homo sapien
ctgaaaaacacttgaaatagcttcttcaacacatatattgtatagctatttaaaacccaaatacaaatgttatatgaagactttcaaaaggccgcaggataattccaatggatctatttgttcagtcattcagaagctatatcgggaacccatcatggatgagctctgctctaggcatggggagaaaggatgaggaagacaaatatggccctagttcttgtggatcttatgttctagtggtggtgactattactttttgaattgtgtatttgccacaggggagattggattactcttcagaaattttataagcatctagagatgacctgcattattgccttgggcaggaaaataacagggttgaaaaaaatctgaacaaagaaatcaccatttgatggatatacacaggataatcttttctgaagttactaaaatggcgaagttcccaaaaaatgtaatgcgaattaaatttcactttgcctctgagaaaaagttaaaagaatttattattactctcgctacatgtattatcaaaaatgaagggttgatatttttaaggaatgaagagttggccagtcactttagtgaagttttattttttcgtaaatatagtttgcctttgcttccatgaaaaaatagctcataaaccttgaccctgatgaaagcactgggccagttttccaattctctgttatgtaaaaaggcataagtcaattgttcaaagt

SEQ ID NO: 556 - protein, 78 aa, Homo sapien [sequence omitted]

SEQ ID NO: 557 - DNA, 473 bp, Homo sapien
ggcacaaggggggataggtggggggcccaaagaagggcatggtcagcctgtctgggagggagttgcatgtgtgcatctgaggtagggacaggcatgcatcttacaggatgaatatcgagcagagttacagagagggggaaactccttgaggtttcaggaatcacctaatccactgtgactcacaaattcctgcctcttggctttgcctgcagcatatctcctggaagtgtgctggggcaaaactcatcccagaccaccatctccatcctcccccaatacaccctggctctccctggctacccttgagcacggtgcacgtgtgcatgggtgcatgcctgcatatatagctatcccccatgtatttcccaaagccctacataatgcttcagtttgctaaggaaaaaatgttaattactgcaaatgtgtttaaaactgtaaaagtacattaaacaaactctgtaaagtgtgaaaaa

SEQ ID NO: 558 - protein, 36 aa, Homo sapien [sequence omitted]

SEQ ID NO: 559 - DNA, 1997 bp, Homo sapien
gtactatcctccttacttttgggtcgggccctccgggaagatggcggccgtgcaggcggccgaggtgaaagtggatggcagcgagccgaaactgagcaagaatgagctgaagagacgcctgaaagctgagaagaaagtagcagagaaggaggccaaacagaaagagctcagtgagaaacagctaagccaagccactgctgctgccaccaaccacaccactgataatggtgtgggtcctgaggaagagagcgtggacccaaatcaatactacaaaatccgcagtcaagcaattcatcagctgaaggtcaatggggaagacccatacccacacaagttccatgtagacatctcactcactgacttcatccaaaaatatagtcacctgcagcctggggatcacctgactgacatcaccttaaaggtggcaggtaggatccatgccaaaagagcttctgggggaaagctcatcttctatgatcttcgaggagagggggtgaagttgcaagtcatggccaattccagaaattataaatcagaagaagaatttattcatattaataacaaactgcgtcggggagacataattggagttcaggggaatcctggtaaaaccaagaagggtgagctgagcatcattccgtatgagatcacactgctgtctccctgtttgcatatgttacctcatcttcactttgggctcaaagacaaggaaacaaggtatcgccagagatacttggacttgatcctgaatgactttgtgaggcagaaatttatcatccgctctaagatcatcacatatataagaagtttcttagatgagctgggattcctagagattgaaactcccatgatgaacatcatcccagggggagccgtggccaagcctttcatcacttatcacaacgagctggacatgaacttatatatgagaattgctccagaactctatcataagatgcttgtggttggtggcatcgaccgggtttatgaaattggacgccagttccggaatgaggggattgatttgacgcacaatcctgagttcaccacctgtgagttctacatggcctatgcagactatcacgatctcatggaaatcacggagaagatggtttcagggatggtgaagcatattacaggcagttacaaggtcacctaccacccagatggcccagagggccaagcctacgatgttgacttcaccccacccttccggcgaatcaacatggtagaagagcttgagaaagccctggggatgaagctgccagaaacgaacctctttgaaactgaagaaactcgcaaaattcttgatgatatctgtgtggcaaaagctgttgaatgccctccacctcggaccacagccaggctccttgacaagcttgttggggagttcctggaagtgacttgcatcaatcctacattcatctgtgatcacccacagataatgagccctttggctaaatggcaccgctctaaagagggtctgactgagcgctttgagctgtttgtcatgaagaaagagatatgcaatgcgtatactgagctgaatgatcccatgcggcagcggcagctttttgaagaacaggccaaggccaaggctgcaggtgatgatgaggccatgttcatagatgaaaacttctgtactgccctggaatatgggctgccccccacagctggctggggcatgggcattgatcgagtcgccatgtttctcacggactccaacaacatcaaggaagtacttctgtttcctgccatgaaacccgaagacaagaaggagaatgtagcaaccactgatacactggaaagcacaacagttggcacttctgtctagaaaataataattgcaagttgtataactcaggcgtctttgcatttctgcgaaagatcaaggtctgcaagggaattcttgtgtgctgctttccatttgacaccgcagttctgttcagccatcagaagagagacaaggaattaaaaatttctttttaatcctgtta

SEQ ID NO: 560 - protein, 597 aa, Homo sapien
MAAVQAAEVKVDGSEPKLSKNELKRRLKAEKKVAEKEAKQKELSEKQLSQATAAATNHTTDNGVGPEEESVDPNQYYKIRSQAIHQLKVNGEDPYPHKFHVDISLTDFIQKYSHLQPGDHLTDITLKVAGRIHAKRASGGKLIFYDLRGEGVKLQVMANSRNYKSEEEFIHINNKLRRGDIIGVQGNPGKTKKGELSIIPYEITLLSPCLHMLPHLHFGLKDKETRYRQRYLDLILNDFVRQKFIIRSKIITYIRSFLDELGFLEIETPMMNIIPGGAVAKPFITYHNELDMNLYMRIAPELYHKMLVVGGIDRVYEIGRQFRNEGIDLTHNPEFTTCEFYMAYADYHDLMEITEKMVSGMVKHITGSYKVTYHPDGPEGQAYDVDFTPPFRRINMVEELEKALGMKLPETNLFETEETRKILDDICVAKAVECPPPRTTARLLDKLVGEFLEVTCINPTFICDHPQIMSPLAKWHRSKEGLTERFELFVMKKEICNAYTELNDPMRQRQLFEEQAKAKAAGDDEAMFIDENFCTALEYGLPPTAGWGMGIDRVAMFLTDSNNIKEVLLFPAMKPEDKKENVATTDTLESTTVGTSV

SEQ ID NO: 561 - DNA, 5921 bp, Homo sapien
ccagacatggcggaagaggaggtggccaagttggagaagcacttgatgcttctgcggcaggagtatgtcaagctgcagaagaagctggcggagacagagaagcgctgcgctctcttggctgcgcaggcaaacaaggagagcagcagcaagtccttcatcagccgtctgctggccatcgtggcagacctctacgagcaggagcagtacagcgatctgaagataaaggttggggacaggcacatcagtgctcacaagtttgtcctggcagcccgcagtgacagctggagtctggctaacttgtcttccactaaagagttggacctgtcagatgctaatcctgaggtgacggtgacaatgcttcgctggatctatacagatgagctggagttcagagaggatgatgtgttcctgactgaactgatgaaactagcaaatcggtttcagctacagctcctcagggagagatgtgagaagggtgttatgtctctagtgaatgtcaggaactgtattcgcttctaccagacggcagaggagctgaatgccagcacactgatgaactactgtgcagaaattattgcaagtcattgggacgacctgaggaaggaggatttcagcagcatgagccctcagttgttatacaaaatgatcaaatccaagacagagtacccgctacataaagccatcaaagtggagagagaagacgtggtctccctgtatctgattgaaatggattcccagctccctgggaagctgaatgaagcggaccataacggggacctggcattagacctagccctctcacgacgactggagaatattgccaccacgctggttagtcacaaagctgatgtggcatggtggccaagagtgctggagctgttacacaaagggatccaagaggatctctttgctgccactttcctcattaagaatggggcctttgtcaacgctgctacactagggtgccaggagacaccactgcaccttgtggccttgtacagttcaaggaaccactcagcagatgtgatgtctgagatggcgcagattgcagaggcccttctgcaggctggtgccaaccccaacatgcaggacagcaagggaaggacccctttacatgtgtccatcatggccggggatgaatatgtgttcagtcacctgctgcagtgcaaacaactagatttagaactcaaagaccacgagggcagcacggctctgtggctggcagtgcagcatatcacagtgtcttctgaccagtctgtgaaccccttcgaagatgtccccgtggtaaatgggacttcatttgatgagaacagctttgcagccagactcatccagcgcggcagccacacagacgcacctgacacggcgacaggaaactgtttactacagcgggcagctggagcaggaaacgaggcagcagctcttttcctggcaaccaacggtgcccatgtcaaccacagaaacaagtggggagaaaccccgttgcacacagcgtgtcggcatggcctggccaacctcacagcagagctcctgcagcaaggcgccaacccaaacctgcagacggaggaagctctgcctctgccaaaggaggccgcatccctgaccagcttggcggacagcgtccatctgcagacgccactgcacatggcgatcgcctataaccatccggatgtggtgtctgtcatcctggagcagaaagccaatgctcttcatgccaccaacaacttgcagatcattccggacttcagcctcaaagattcccgagaccagactgtgctgggcctggcattatggactggcatgcacacgatcgcagcccagctgctgggctctggagccgccatcaatgacaccatgtcggatgggcagacgctactacacatggccatacagcggcaggacagcaagagcgcactcttcctgctggagcaccgggcagatataaatgtcaggcctcaggccggggagacagccctccagctggccatcagaaaccagcttccactcgtagttgatgcaatatgcacccgaggggctgacatgtctgtgccagatgaggaggggaaccccccgctgtggcttgcattggcaaacaatctggaggacatcgcatccactctggtcagacatggctgtggtgccacatgctggggtccgggacctggtgggtgccttcagacgctcctgcacagagccattgatgagaacaacgagcccaccgcctgctttcttattcgcagtggctgtgacgtgaacagtcccagacaaccaggcgccaatggagaaggagaggaagaggctagagatgggcagacccctttgcatttggcagcctcttgggggctggagacagtacagtgtcttctggagtttggtgccgacgtgaacccacaggatgcagaaggaagaaccccatgccacgtggccatcagcagccaacacggtgtcatcattcagctgttggtttctcacccgatatccagtttgaatgtacgggacaaacaagggctgaccccgtttgcctgtgccatgactttcaaggacaacaagtcagccgaggccattctcaaacgggggtccggggctgctgagcaggtggataacaagggccggaattcccttcatgtggcagttcagaactctgatattgaaagtgtgctgtccctgatcagtgtccacgctaatgtgaattcaagagcccaggatgcccccaagttgacccccctgcacctggttgtccaagaaggctcagaaattattgtccgcaatttgcttcttgcgggagccaaagtgaccgaattaaccaagcatcgcaagactgccctccatcttgctgcccaggaggacctgcccaccatctgctcagtcctcctagagaatgccgtggactttgctgccgtggatgagaatggaaacaatgctcttcatcttgctgtaatgcacggccggctcaacaacatccgggttctcctgacagagtgcacagtggacgccgaagcctttaatctcagaggccagtcaccactgcacattttgggacaatatggcaaggagaatgcagcggccatctttgatctcttcctagaatgcatgccggggtatcctctggacaagccggatgcagacggcagcacggtgctgctcctggcatacatgaaagggaacgccaacttgtgccgcgccatcgtccggtcgggggctcgcctcggggtgaataacaaccagggagtcaacatcttcaactaccaggtcgccaccaagcagctcctgttccgactgctggatatgctgtccaaggagcccccgtggtgtgacggctcctactgctatgagtgcactgccaggttcggagtcgccactcgcaaacaccactgtcgtcactgcggacgtcttctttgccataaatgctcgaccaaggagattcctattataaagtttgatctgaacaagcctgtgcgggtttgcacaatttgttttgatgtactgactctgggtggggtttcttagtgagcccccggaggtccaggcacgtccttggtcacctcccagcagcttctctctcaccagcctgacccacccagagcaggagctggcgggtgtcttcctgcggcaatagacttggacgattaaggaccatggtgtgatagatccatgtcaaatgatcccatatgattgtcagtgtgtgtgtcagactgtgatcgatttcactagatgtctaactcatcagcccagccattggcctaagtggtaaatgtgattaggaattagacctctccccattctgctagcaacatacaggacacttggaaaaccatttccccttccagtagcttggtgtccatcccagagcattcatgaagtcttcccgcctggctgactgatgagcagagcctctcagcgtaggaagctggctgcttaatgagctggctttactctagggtaagtggctgtggacttttctgcacagtgttttcataaagataataggatcctcttgccctgaagtcttttttctttttacgctaagctgtatttttagtgagctaccccttttaaaaaggtgaaatctttcttaacagggttcaaagatgagagctgaaaaatcgtggccttaacaactgaaagctttacagtgttcatgctactgaggtgtcaggagtgcagctgggccgcttgacacctcgtagcagccgtctcattctctcgtcttgctgcgtcctgtctgtggagtcctcagtcactctgctgttggagagtgctggaggaaatgcacttttactgtgctgcactttttatagagctgcattgtcggtgattccagtttaaaatccatattcaaaatacctaacacatccctgcatcagtgattctaatgatcagctttgactggacctcagctcacacgatctccaaggaaaactctacagggcatcttttagagcagagatcatacaggccagtgatgagaggggagtcaccaaggcttcagcccaagggcatctccagcctcaggccggcaggtcctatgtccttgacacaaacgttcttgctgaaatcctccctagtgatgctgcgagtgctgttggtcccagttctgtgtagcttgccctgccccatgaagggccaccagccaagggccctggccacgtgtgcgccaccttactttgggaagtctctggcttgtgtgctggatgaggctgccagaacttgttgggcgttcatcgctgttagtacatatattaaccgtgagtgttaaacttttcttttgaaggtttggcagtttctaaaaaatgcacatttaaagagaagcatctaccacggctttaaaacaaaacaactctgagatgaacaatatgtgttatactcagagattaacaatctcaatcatacatactgattctttcagacatttaataaccactacatttttttgcattaatgaagtttgactatatgtgtaaagggcctaaatattttcgcacagcctgttctttgttcattctttctggatagtgtgtcctctgtattgcggtagattatacatctgttgcctaaatatgtgtgtaatgagctgataaactggagtactacttaaaaaaagtctgtgatttataagatgtatatgcttctatgtgatataagcttgtcacaatgtttaaaggaaacaatgaattagaagggatcccccgtcccagtctgacatattcatacagatgtttaaagaaaactctgctagtcttgcaaacattggccatgtgagcatgtggcagttccatttctattacctggaaaggccataaggaagcaggcagggcttaggtagcttggttacctaagttagaaagtaagagaatcatggttcggatatgaattgaagtgggtggtacatggatacctgttctttaaaaggaatgtggagatgagtcaagggtgaggccgattgttctgcccatgccctaccataccaatttcaataacaatcttgcctgtcattgcactcagaatcttaagatcatgtttcaaatatgttgattcaaacttgcttctaagcctgagtccagggatagcaatggtactgaccagctatggactggagaacattgagtcctgttttccattggcttcagggcgcatccatgtggatataggaaaagcctctttccacagacttaggaagccccccgacccacgcggacgctcgctgggctgcactcagcaggctgcttgagtgggagctgactccaacatgccctgccctggctgggactaggcatgcttccagcccttcccgtgctctccctgctgtcaacacttgcgtacaaacctgcctagctgttgtaagttttcatcagtagcttaagtactagtagcaaaaacttaaattcattcagaaagttgccacttctgaatgagtagagcag

SEQ ID NO: 562 - protein, 1166 aa, Homo sapien
MAEEEVAKLEKHLMLLRQEYVKLQKKLAETEKRCALLAAQANKESSSKSFISRLLAIVADLYEQEQYSDLKIKVGDRHISAHKFVLAARSDSWSLANLSSTKELDLSDANPEVTVTMLRWIYTDELEFREDDVFLTELMKLANRFQLQLLRERCEKGVMSLVNVRNCIRFYQTAEELNASTLMNYCAEIIASHWDDLRKEDFSSMSPQLLYKMIKSKTEYPLHKAIKVEREDVVSLYLIEMDSQLPGKLNEADHNGDLALDLALSRRLENIATTLVSHKADVAWWPRVLELLHKGIQEDLFAATFLIKNGAFVNAATLGCQETPLHLVALYSSRNHSADVMSEMAQIAEALLQAGANPNMQDSKGRTPLHVSIMAGDEYVFSHLLQCKQLDLELKDHEGSTALWLAVQHITVSSDQSVNPFEDVPVVNGTSFDENSFAARLIQRGSHTDAPDTATGNCLLQRAAGAGNEAAALFLATNGAHVNHRNKWGETPLHTACRHGLANLTAELLQQGANPNLQTEEALPLPKEAASLTSLADSVHLQTPLHMAIAYNHPDVVSVILEQKANALHATNNLQIIPDFSLKDSRDQTVLGLALWTGMHTIAAQLLGSGAAINDTMSDGQTLLHMAIQRQDSKSALFLLEHRADINVRPQAGETALQLAIRNQLPLVVDAICTRGADMSVPDEEGNPPLWLALANNLEDIASTLVRHGCGATCWGPGPGGCLQTLLHRAIDENNEPTACFLIRSGCDVNSPRQPGANGEGEEEARDGQTPLHLAASWGLETVQCLLEFGADVNPQDAEGRTPCHVAISSQHGVIIQLLVSHPISSLNVRDKQGLTPFACAMTFKDNKSAEAILKRGSGAAEQVDNKGRNSLHVAVQNSDIESVLSLISVHANVNSRAQDAPKLTPLHLVVQEGSEIIVRNLLLAGAKVTELTKHRKTALHLAAQEDLPTICSVLLENAVDFAAVDENGNNALHLAVMHGRLNNIRVLLTECTVDAEAFNLRGQSPLHILGQYGKENAAAIFDLFLECMPGYPLDKPDADGSTVLLLAYMKGNANLCRAIVRSGARLGVNNNQGVNIFNYQVATKQLLFRLLDMLSKEPPWCDGSYCYECTARFGVATRKHHCRHCGRLLCHKCSTKEIPIIKFDLNKPVRVCTICFDVLTLGGVS

SEQ ID NO: 563 - DNA, 826 bp, Homo sapien
ttccggccttgtaatcgccgagggcacgtgcatgccccctggttaagagttgcaggtagcggtagcgatggacactctggatcgagtagtaaagcccaaaacgaaaagagccaagagattccttgagaagagagaaccgaaactcaatgaaaatattaaaaatgccatgctgattaaagggggaaatgcaaatgcaacagtgacaaaagtacttaaagatgtgtatgcactgaaaaaaccatacggtgtactatataaaaagaaaaatattacaagaccttttgaggatcagacatcactggaattcttttcaaagaagtcagattgttctttattcatgtttggctcccataataagaagcggccaaataatctagtaataggtcgtatgtatgactaccatgtgctggatatgattgaattaggtattgagaattttgtctctctaaaagacattaagaacagtaaatgtcctgagggaacaaaacccatgctgatatttgctggcgatgatttcgatgtaacagaagattatagaagactaaaaagtcttcttattgatttcttcagaggccccacagtatcaaatatccgcctggctggattagagtatgttctgcacttcactgcactgaatgggaagatttactttcgaagctataagttgctgttgaagaaatctggttgcagaacaccacggattgaattggaagagatgggaccctcattggatctggttctgaggaggacacacctggcatcggatgacctttataaattatctatgaaaatgccaaaagctctcaagccaaaaaaaaaaaaaaaa

SEQ ID NO: 564 - protein, 252 aa, Homo sapien
MDTLDRVVKPKTKRAKRFLEKREPKLNENIKNAMLIKGGNANATVTKVLKDVYALKKPYGVLYKKKNITRPFEDQTSLEFFSKKSDCSLFMFGSHNKKRPNNLVIGRMYDYHVLDMIELGIENFVSLKDIKNSKCPEGTKPMLIFAGDDFDVTEDYRRLKSLLIDFFRGPTVSNIRLAGLEYVLHFTALNGKIYFRSYKLLLKKSGCRTPRIELEEMGPSLDLVLRRTHLASDDLYKLSMKMPKALKPKKKK

SEQ ID NO: 565 - DNA, 1077 bp, Homo sapien
gataccatacctgaacacctgaacattcttcacaaggtagtaaatgcactgctttattctggtctcagtattgtgtgcttaataaggaaatgagaaagggtggatcagggcataggatgaacaagttactgctagacctctcacaatgccactaatggataagattgtattttcatcattcttgtctcttcggaagctaacaccatgctataataggcactaaatagatgtctaaaaacaccttaagtatttgtctagaaatctggtgcattgttcagaaagaaccaaaattcaaaataatttcaaagggcctaaagcactagttaatcaaaattcattagtttttaatggtactaccactctcaaatttaaaatgtcatcttacgttcctcttcctcgcattggatttattgctaaaacctggtaaacacttttaatccttttcaattccattaccactgctcttgtccagaattacttcgcagactaatagtcacctgacttctcccctgcatccgatttgctgtctaattctggttacaaataagtaactgccaaactaatctttctaaaaagcaagactgatctcgtcactcctttgctcaacaatgtaaaagctcccattgtctcccaaataaaaccagctttccactgtgtatacaatacatccatgatctgtatccagcatcattttgtattagctcactttatacaccaccccccatgccacatcaaattaaattatcctgataaatgcaactgcatttaccctttcccttattttgttctttatgttgtaggcctcctttgtgcccatttcttcagaagacatcccctacagccatggttctcatccagagggtcttttgcccccgcaggagacatctgacaacgtttagagacagttaccacaactggaagatggaataaaaagatgctgctaaacatcctacaacaattatctggccaaaaatgtgctgaggttaagaaaccctgtcctacagattatttcccttattctgggtacatagaagtaactcctttttttctatgaaaatttccacaattttttttttt

SEQ ID NO: 566 - protein, 72 aa, Homo sapien
MICIQHHFVLAHFIHHPPCHIKLNYPDKCNCIYPFPYFVLYVVGLLCAHFFRRHPLQPWFSSRGSFAPAGDI

SEQ ID NO: 567 - DNA, 2591 bp, Homo sapien
cccggacgtgcggctcccctcggcctcctcgccatggacgcggacgactcccgggcccccaagggctccttgcggaagttcctggagcacctctccggggccggcaaggccatcggcgtgctgaccagcggcggggatgctcaaggtatgaacgctgccgtccgtgccgtggtgcgcatgggtatctacgtgggggccaaggtgtacttcatctacgagggctaccagggcatggtggacggaggctcaaacatcgcagaggccgactgggagagtgtctccagcatcctgcaagtgggcgggacgatcattggcagtgcgcggtgccaggccttccgcacgcgggaaggccgcctgaaggctgcttgcaacctgctgcagcgcggcatcaccaacctgtgtgtgatcggcggggacgggagcctcaccggggccaacctcttccggaaggagtggagtgggctgctggaggagctggccaggaacggccagatcgataaggaggccgtgcagaagtacgcctacctcaacgtggtgggcatggtgggctccatcgacaatgatttctgcggcaccgacatgaccatcggcacggactccgccctgcacaggatcatcgaggtcgtcgacgccatcatgaccacggcccagagccaccagaggaccttcgttctggaggtgatgggacgacactgtgggtacctggccctggtgagtgccttggcctgcggtgcggactgggtgttccttccagaatctccaccagaggaaggctgggaggagcagatgtgtgtcaaactctcggagaaccgtgcccggaaaaaaaggctgaatattattattgtggctgaaggagcaattgatacccaaaataaacccatcacctctgagaaaatcaaagagcttgtcgtcacgcagctgggctatgacacacgtgtgaccatcctcgggcacgtgcagagaggagggaccccttcggcattcgacaggatcttggccagccgcatgggagtggaggcagtcatcgccttgctagaggccaccccggacaccccagcttgcgtcgtgtcactgaacgggaaccacgccgtgcgcctgccgctgatggagtgcgtgcagatgactcaggatgtgcagaaggcgatggacgagaggagatttcaagatgcggttcgactccgagggaggagctttgcgggcaacctgaacacctacaagcgacttgccatcaagctgccggatgatcagatcccaaagaccaattgcaacgtagctgtcatcaacgtgggggcacccgcggctgggatgaacgcggccgtacgctcagctgtgcgcgtgggcattgccgacggccacaggatgctcgccatctatgatggctttgacggcttcgccaagggccagatcaaagaaatcggctggacagatgtcgggggctggaccggccaaggaggctccattcttgggacaaaacgcgttctcccggggaagtacttggaagagatcgccacacagatgcgcacgcacagcatcaacgcgctgctgatcatcggtggattcgaggcctacctgggactcctggagctgtcagccgcccgggagaagcacgaggagttctgtgtccccatggtcatggttcccgctactgtgtccaacaatgtgccgggttccgatttcagcatcggggcagacaccgccctgaacactatcaccgacacctgcgaccgcatcaagcagtccgccagcggaaccaagcggcgcgtgttcatcatcgagaccatgggcggctactgtggctacctggccaacatgggggggctcgcggccggagctgatgccgcatacattttcgaagagcccttcgacatcagggatctgcagtccaacgtggagcacctgacggagaaaatgaagaccaccatccagagaggccttgtgctcagaaatgagagctgcagtgaaaactacaccaccgacttcatttaccagctgtattcagaagagggcaaaggcgtgtttgactgcaggaagaacgtgctgggtcacatgcagcagggtggggcaccctctccatttgatagaaactttggaaccaaaatctctgccagagctatggagtggatcactgcaaaactcaaggaggcccggggcagaggaaaaaaatttaccaccgatgattccatttgtgtgctgggaataagcaaaagaaacgttatttttcaacctgtggcagagctgaagaagcaaacggattttgagcacaggattcccaaagaacagtggtggctcaagctacggcccctcatgaaaatcctggccaagtacaaggccagctatgacgtgtcggactcaggccagctggaacatgtgcagccctggagtgtctgacccagtcccgcctgcatgtgcctgcagccaccgtggactgtctgtttttgtaacacttaagttattttatcagcactttatgcacgtattattgacattaatacctaatcggcgagtgcccatctgccccaccagctccagtgcgtgctgtctgtggagtgtgtctcatgctttcagatgtgcatatgagcagaattaattaa

SEQ ID NO: 568 - protein, 784 aa, Homo sapien
MDADDSRAPKGSLRKFLEHLSGAGKAIGVLTSGGDAQGMNAAVRAVVRMGIYVGAKVYFIYEGYQGMVDGGSNIAEADWESVSSILQVGGTIIGSARCQAFRTREGRLKAACNLLQRGITNLCVIGGDGSLTGANLFRKEWSGLLEELARNGQIDKEAVQKYAYLNVVGMVGSIDNDFCGTDMTIGTDSALHRIIEVVDAIMTTAQSHQRTFVLEVMGRHCGYLALVSALACGADWVFLPESPPEEGWEEQMCVKLSENRARKKRLNIIIVAEGAIDTQNKPITSEKIKELVVTQLGYDTRVTILGHVQRGGTPSAFDRILASRMGVEAVIALLEATPDTPACVVSLNGNHAVRLPLMECVQMTQDVQKAMDERRFQDAVRLRGRSFAGNLNTYKRLAIKLPDDQIPKTNCNVAVINVGAPAAGMNAAVRSAVRVGIADGHRMLAIYDGFDGFAKGQIKEIGWTDVGGWTGQGGSILGTKRVLPGKYLEEIATQMRTHSINALLIIGGFEAYLGLLELSAAREKHEEFCVPMVMVPATVSNNVPGSDFSIGADTALNTITDTCDRIKQSASGTKRRVFIIETMGGYCGYLANMGGLAAGADAAYIFEEPFDIRDLQSNVEHLTEKMKTTIQRGLVLRNESCSENYTTDFIYQLYSEEGKGVFDCRKNVLGHMQQGGAPSPFDRNFGTKISARAMEWITAKLKEARGRGKKFTTDDSICVLGISKRNVIFQPVAELKKQTDFEHRIPKEQWWLKLRPLMKILAKYKASYDVSDSGQLEHVQPWSV

SEQ ID NO: 569 - DNA, 472 bp, Homo sapien
  unsure 63: unknown base
agccttagcaagacatttctacattaaagagaaggactttaacacagctctggactgggcacntcaggccaaaatgaaagcacctaaaaattcctatatttcagatacactaggtcaagtctacaaaagtgaaatcaaatggtggttggatgggaacaaaaactgtaggagcattactgttaatgacctaacacatctcctagaagctgcggaaaaagcctcaagagctttcaaagaatcccaaaggcaaactgatagtaaaaactatgaaaccgagaactggtcaccacagaagtcccagagacgatatgacatgtataacacagcttgtttcttgggtgaaatagaagttggtctttacactatccagattcttcagctcactccctttttccacaaagaaaatgaattagccaaataacattcatttctgggatcaggaggaatggtccactttcctgataaaaattgc

SEQ ID NO: 570 - protein, 139 aa, Homo sapien
  unsure 21: unknown amino acid
ALARHFYIKEKDFNTALDWAXQAKMKAPKNSYISDTLGQVYKSEIKWWLDGNKNCRSITVNDLTHLLEAAEKASRAFKESQRQTDSKNYETENWSPQKSQRRYDMYNTACFLGEIEVGLYTIQILQLTPFFHKENELAK

SEQ ID NO: 571 - DNA, 1978 bp, Homo sapien
ggcacgagggtccgcaagcccggctgagagcgcgccatggggcaggcgggctgcaaggggctctgcctgtcgctgttcgactacaagaccgagaagtatgtcatcgccaagaacaagaaggtgggcctgctgtaccggctgctgcaggcctccatcctggcgtacctggtcgtatgggtgttcctgataaagaagggttaccaagacgtcgacacctccctgcagagtgctgtcatcaccaaagtcaagggcgtggccttcaccaacacctcggatcttgggcagcggatctgggatgtcgccgactacgtcattccagcccagggagagaacgtcttttttgtggtcaccaacctgattgtgacccccaaccagcggcagaacgtctgtgctgagaatgaaggcattcctgatggcgcgtgctccaaggacagcgactgccacgctggggaagcggttacagctggaaacggagtgaagaccggccgctgcctgcggagagggaacttggccaggggcacctgtgagatctttgcctggtgcccgttggagacaagctccaggccggaggagccattcctgaaggaggccgaagacttcaccattttcataaagaaccacatccgtttccccaaattcaacttctccaaaaacaatgtgatggacgtcaaggacagatctttcctgaaatcatgccactttggccccaagaaccactactgccccatcttccgactgggctccatcgtccgctgggccgggagcgacttccaggatatagccctgcgaggtggcgtgataggaattaatattgaatggaactgtgatcttgataaagctgcctctgagtgccaccctcactattcttttagccgtctggacaataaactttcaaagtctgtctcctccgggtacaacttcagatttgccagatattaccgagacgcagccggggtggagttccgcaccctgatgaaagcctacgggatccgctttgacgtgatggtgaacggcaagggtgctttcttctgcgacctggtactcatctacctcatcaaaaagagagagttttaccgtgacaagaagtacgaggaagtgaggggcctagaagacagttcccaggaggccgaggacgaggcatcggggctggggctatctgagcagctcacatctgggccagggctgctggggatgccggagcagcaggagctgcaggagccacccgaggcgaagcgtggaagcagcagtcagaaggggaacggatctgtgtgcccacagctcctggagccccacaggagcacgtgaattgcctctgcttacgttcaggccctgtcctaaacccagccgtctagcacccagtgatcccatgcctttgggaatcccaggatgctgcccaacgggaaatttgtacattgggtgctatcaatgccacatcacagggaccagccatcacagagcaaagtgacctccacgtctgatgctggggtcatcaggacggacccatcatggctgtctttttgccccaccccctgccgtcagttcttcctttctccgtggctggcttcccgcactagggaacgggttgtaaatggggaacatgacttccttccggagtccttgagcacctcagctaaggaccgcagtgccctgtagagttcctagattacctcactgggaatagcattgtgcgtgtccggaaaagggctccatttggttccagcccactcccctctgcaagtgccacagcttccctcagagcatactctccagtggatccaagtactctctctcctaaagacaccaccttcctgccagctgtttgcccttaggccagtacacagaattaaagtgggggagatggcagacgctttctgggacctgcccaagatatgtattctctgacactcttatttggtcataaaacaataaatggtgtcaatttcaaaaaaaaaaaaaaaaaaaaaaaaaaaaaaaaaaa

SEQ ID NO: 572 - protein, 422 aa, Homo sapien
MGQAGCKGLCLSLFDYKTEKYVIAKNKKVGLLYRLLQASILAYLVVWVFLIKKGYQDVDTSLQSAVITKVKGVAFTNTSDLGQRIWDVADYVIPAQGENVFFVVTNLIVTPNQRQNVCAENEGIPDGACSKDSDCHAGEAVTAGNGVKTGRCLRRGNLARGTCEIFAWCPLETSSRPEEPFLKEAEDFTIFIKNHIRFPKFNFSKNNVMDVKDRSFLKSCHFGPKNHYCPIFRLGSIVRWAGSDFQDIALRGGVIGINIEWNCDLDKAASECHPHYSFSRLDNKLSKSVSSGYNFRFARYYRDAAGVEFRTLMKAYGIRFDVMVNGKGAFFCDLVLIYLIKKREFYRDKKYEEVRGLEDSSQEAEDEASGLGLSEQLTSGPGLLGMPEQQELQEPPEAKRGSSSQKGNGSVCPQLLEPHRST

SEQ ID NO: 573 - DNA, 835 bp, Homo sapien
gtgtgcctggtagatccccggggcaagccctgtgagacagtgttccagaggctaagctacaatggccagtccagtgtggtacggtgccggccactcacaggccgcacacaccagattcgagtccaccttcagttcttgggccatcccattctcaacgaccccatctacaactcagttgcctggggtccttctcgaggccggggcggctacattcccaagacaaacgaggagttgctacgggacctggtagcagagcaccaggccaaacagagcctggatgtgctagatctctgtgagggtgacctgtccccaggactcacagactctacggccccctcctcagagttgggcaaggacgacctggaagagttggctgcagctgcccagaagatggaggaagtagctgaggcagcccctcaggagttggacacaatagccttggcatcagagaaggcagttgaaacagatgtcatgcatcagagacagaccactctctgcagagtgccggctggtgcgacaggatcccttgccccaagaccttgtgatgttcctacatgccctacgctataaagggccaggctttgagtacttttcaccaatgcctgcctgggcacaggatgactggcaaaaggactgagggtgtggccaatggagggattgcttcttgggttgtgacaaggatgggctatagggcaagggctgaccccatgggctagtacttggggtttctataggaatgaggacgggcttctaaagagacctgctcatacttgctacctccttccagtgggaatttggagactttttggtttgtaaatatatccctttttctaac

SEQ ID NO: 574 - protein, 189 aa, Homo sapien
VCLVDPRGKPCETVFQRLSYNGQSSVVRCRPLTGRTHQIRVHLQFLGHPILNDPIYNSVAWGPSRGRGGYIPKTNEELLRDLVAEHQAKQSLDVLDLCEGDLSPGLTDSTAPSSELGKDDLEELAAAAQKMEEVAEAAPQELDTIALASEKAVETDVMHQRQTTLCRVPAGATGSLAPRPCDVPTCPTL

SEQ ID NO: 575 - DNA, 2332 bp, Homo sapien
gtccgggattcccagccatggcagattcctccgggcagcagggcaaaggccggcgtgtgcagccccagtggtcccctcctgctgggacccagccatgcagactccacctttacaacagcctcaccaggaacaaggaagtgttcatacctcaagatgggaaaaaggtgacgtggtattgctgtgggccaaccgtctatgacgcatctcacatggggcacgccaggtcctacatctcttttgatatcttgagaagagtgttgaaggattacttcaaatttgatgtcttttattgcatgaacattacggatattgatgacaagatcatcaagagggcccggcagaaccacctgttcgagcagtatcgggagaagaggcctgaagcggcacagctcttggaggatgttcaggccgccctgaagccattttcagtaaaattaaatgagaccacggatcccgataaaaagcagatgctcgaacggattcagcacgcagtgcagcttgccacagagccacttgagaaagctgtgcagtccagactcacgggagaggaagtcaacagctgtgtggaggtgttgctggaagaagccaaggatttgctctctgactggctggattctacacttggctgtgatgtcactgacaattccatcttctccaagctgcccaagttctgggagggggacttccacagagacatggaagctctgaatgttctccctccagatgtcttaacccgggttagtgagtatgtgccagaaattgtgaactttgtccagaagattgtggacaacggttacggctatgtctccaatgggtctgtctactttgatacagcgaagtttgcttctagcgagaagcactcctatgggaagctggtgcctgaggccgttggagatcagaaagcccttcaagaaggggaaggtgacctgagcatctctgcagaccgcctgagtgagaagcgctctcccaacgactttgccttatggaaggcctctaagcccggagaaccgtcctggccgtgcccttggggaaagggtcgtccgggctggcatatcgagtgctcggccatggcaggcaccctcctaggggcttcgatggacattcacggaggtgggttcgacctccggttcccccaccatgacaatgagctggcacagtcggaggcctactttgaaaacgactgctgggtcaggtacttcctgcacacaggccacctgaccattgcaggctgcaaaatgtcaaagtcactaaaaaacttcatcaccattaaagatgccttgaaaaagcactcagcacggcagttgcggctggccttcctcatgcactcgtggaaggacaccctggactactccagcaacaccatggagtcagcgcttcaatatgagaagttcttgaatgagtttttcttaaatgtgaaagatatccttcgcgctcctgttgacatcactggtcagtttgagaagtggggagaagaagaagcagaactgaataagaacttttatgacaagaagacagcaattcacaaagccctctgtgacaatgttgacacccgcaccgtcatggaagagatgcgggccttggtcagtcagtgcaacctctatatggcagcccggaaagccgtgaggaagaggcccaaccaggctctgctggagaacatcgccctgtacctcacccatatgctgaagatctttggggccgtagaagaggacagctccctgggattcccggtcggagggcctggaaccagcctcagtctcgaggccacagtcatgccctaccttcaggtgttatcagaattccgagaaggagtgcggaagattgcccgagagcaaaaagtccctgagattctgcagctcagcgatgccctgcgggacaacatcctgcccgagcttggggtgcggtttgaagaccacgaaggactgcccacagtggtgaaactggtagacagaaacaccttattaaaagagagagaagaaaagagacgggttgaagaggagaagaggaagaagaaagaggaggcggcccggaggaaacaggaacaagaagcagcaaagctggccaagatgaagattccccccagtgagatgttcttgtcagaaaccgacaaatactccaagtttgatgaaaatggtctgcccacacatgacatggagggcaaagagctcagcaaagggcaagccaagaagctgaagaagctcttcgaggctcaggagaagctctacaaggaatatctgcagatggcccagaatggaagcttccagtgagggggcacaggactgactttttaaaccattgtggactagtggctgctgtctgcctcagtgacaatgtc

SEQ ID NO: 576 - protein, 748 aa, Homo sapien
MADSSGQQGKGRRVQPQWSPPAGTQPCRLHLYNSLTRNKEVFIPQDGKKVTWYCCGPTVYDASHMGHARSYISFDILRRVLKDYFKFDVFYCMNITDIDDKIIKRARQNHLFEQYREKRPEAAQLLEDVQAALKPFSVKLNETTDPDKKQMLERIQHAVQLATEPLEKAVQSRLTGEEVNSCVEVLLEEAKDLLSDWLDSTLGCDVTDNSIFSKLPKFWEGDFHRDMEALNVLPPDVLTRVSEYVPEIVNFVQKIVDNGYGYVSNGSVYFDTAKFASSEKHSYGKLVPEAVGDQKALQEGEGDLSISADRLSEKRSPNDFALWKASKPGEPSWPCPWGKGRPGWHIECSAMAGTLLGASMDIHGGGFDLRFPHHDNELAQSEAYFENDCWVRYFLHTGHLTIAGCKMSKSLKNFITIKDALKKHSARQLRLAFLMHSWKDTLDYSSNTMESALQYEKFLNEFFLNVKDILRAPVDITGQFEKWGEEEAELNKNFYDKKTAIHKALCDNVDTRTVMEEMRALVSQCNLYMAARKAVRKRPNQALLENIALYLTHMLKIFGAVEEDSSLGFPVGGPGTSLSLEATVMPYLQVLSEFREGVRKIAREQKVPEILQLSDALRDNILPELGVRFEDHEGLPTVVKLVDRNTLLKEREEKRRVEEEKRKKKEEAARRKQEQEAAKLAKMKIPPSEMFLSETDKYSKFDENGLPTHDMEGKELSKGQAKKLKKLFEAQEKLYKEYLQMAQNGSFQ

SEQ ID NO: 577 - DNA, 2546 bp, Homo sapien
cagcggcggcccaggaggcagccggtgagcgcctgcgagcagagtggcgggggccgctgacaggtcccgcgcagcccagcccagcccagccacgcggctcacaggtggggtccaagagcagtttggagcaacccggcgctacggagaggggtggacggctctgcacgggcctcctgtctcccgctcgggcagagggactcggggggacctcgctccttggccgagagaacctgaactcgggcggagagaacgcgcccaggcgggcaaggggaccagagaaagccggggctggaagtcactgtcgctcgccactgtctggagcgcacggagcgcagaggcccggcagccgcgcgtgccctcccggggaccgagccagtgatgcaggatcgctgagcggagatccgcgccgagaagtctctcggggccggggctgagacgcacgccttcgacaccgctgccaagaccccgattccggcgactcttgcggggaaccgaggggccaaggctgccccaagctcaggacttgggcgagtctaagacgatggtttcttaagcacggacccgcgttccccttcccgccccctcgactggaggcagggatcctgcgcggggcccccgggattccgtttccccgcggagccccggccgctgcctcccgggacagttcgcacggccacaggggcgcacggcgatgtggcctccgtccagcgcgctggcccgccggggggatgctctggcacctgtcggggtccaggcctagcatggccggcgcgttgcccgacgtcgcctccggctaggatggcccctccgggcccggccagtgccctctccacctcggccgagccgctgtcccgcagcatcttccggaagttcttgctgatgctctgctccctgctcacgtccctttacgtcttctactgcctggccgagcgctgccagaccctgtccggccccgtcgtggggctgtccggcggcggcgaggaggcgggggcccctggtggcggcgtcctggccggaggcccgagggagctggcggtgtggccggcggcggcacagagaaagcgcctcctgcaactgccgcagtggcggaggcgccggccgcccgcgccccgcgacgacggcgaggaggcggcctgggaagaagagtcccctggcctgtcagggggtccgggcggctccggggccggaagcaccgtggccgaggccccgccggggaccctggcgctgctcctggacgaaggcagcaagcagctgccgcaggccatcatcatcggagtgaagaagggcggcacgcgggcgctgctggagttcctgcgcgtgcaccccgacgtgcgcgccgtgggcgccgagccccacttcttcgaccgcagctacgacaagggcctcgcctggtaccgggacctgatgcccagaaccctggacgggcagatcaccatggagaagacgcccagttacttcgtcacgcgggaggcccccgcgcgcatctcggccatgtccaaggacaccaagctcatcgtggtggtgcgggacccggtgaccagggccatctcggactacacgcagacgctgtccaagcggcccgacatccccaccttcgagagcttgacgttcaaaaacaggacagcgggcctcatcgacacgtcgtggagcgccatccagatcggcatctacgccaagcacctggagcactggctgcgccacttccccatccgccagatgctcttcgtgagcggcgagcggctcatcagcgacccggccggggagctgggccgcgtgcaagacttcctgggcctcaagaggatcatcacggacaagcacttctacttcaacaagaccaagggcttcccctgcctgaagaaggcggagggcagcagccggccccattgcctgggcaagaccaagggcaggacccatcctgagatcgaccgcgaggtggtgcgcaggctgcgcgagttctaccggcctttcaacctcaagttctaccagatgaccgggcacgactttggctgggatggataaccatataatttaaaaagaaaaaaaaaatcaaaatataatatatttttttaccaatcggtagagaagagacagtttaatatttgtgctgaaaatatgtttcagtatttttttcaatgaatgttaagagattgttctcactcccgccccatcttaatgtataaccaacaccaaacacgtggatcaacagaaaaggaaaatttcactcgtctaaacactttcaattttcagtttttattttatgttctatatacccagtcataaagtataagcatcagttgtcattaaaagttttcagaaaatcttgaggttaaacatctctctctctttttttaaaatacaaggccctgataaaattgatatctatccttatatttttctccctttttcccgtgccactttttcttaaattatttcccagttagtattatcatatgtttgtacccgtcacagttttcatagtgctttcaaatacacctttttgatcattaaaataaaaaaataaatcttggaaaaaaaaaaaaaaaaaa

SEQ ID NO: 578 - protein, 406 aa, Homo sapien
MAPPGPASALSTSAEPLSRSIFRKFLLMLCSLLTSLYVFYCLAERCQTLSGPVVGLSGGGEEAGAPGGGVLAGGPRELAVWPAAAQRKRLLQLPQWRRRRPPAPRDDGEEAAWEEESPGLSGGPGGSGAGSTVAEAPPGTLALLLDEGSKQLPQAIIIGVKKGGTRALLEFLRVHPDVRAVGAEPHFFDRSYDKGLAWYRDLMPRTLDGQITMEKTPSYFVTREAPARISAMSKDTKLIVVVRDPVTRAISDYTQTLSKRPDIPTFESLTFKNRTAGLIDTSWSAIQIGIYAKHLEHWLRHFPIRQMLFVSGERLISDPAGELGRVQDFLGLKRIITDKHFYFNKTKGFPCLKKAEGSSRPHCLGKTKGRTHPEIDREVVRRLREFYRPFNLKFYQMTGHDFGWDG

SEQ ID NO: 579 - DNA, 2032 bp, Homo sapien
gctgttgagaagctacccgcggggttgtagacctcggacctcatggcagagataattcaggaacgcatagaagatcggctcccggaattggaacagctggagcgcattggactgttcagtcatgcggagattaaggctatcattaagaaggcttccgatctagagtacaaaatccagagaagaacccttttcaaggaagactttatcaattatgttcaatatgaaattaatcttttggagctgatccggagaagaagaacacgcattggatattcatttaagaaggatgagattgagaattctattgtacaccgggtacaaggtgttttccagcgtgcctcagcaaaatggaaagacgatgttcaactttggctctcctatgtggctttttgtaagaagtgggctactaaaactcgacttagcaaggtattctctgccatgttggcgattcattccaacaaaccagctttgtggattatggcagccaaatgggaaatggaagatcgattgtcttcagaaagcgcaaggcaactatttcttcgcgcactgcgctttcatccagagtgcccaaaactttataaagaatactttaggatggagctgatgcatgctgaaaaactgaggaaggagaaggaagaatttgaaaaagccagtatggatgtggagaatcctgattattctgaagaaatccttaagggcgagttggcatggatcatctacaaaaattctgtaagcataattaaaggtgcagaatttcacgtgtcactgctttcgattgcacagctatttgactttgccaaagatctacaaaaagagatttatgatgaccttcaggctctacacacagatgatcctctcacttgggattatgtggcaaggcgagaattagagattgagtcacagacagaagagcagcctacaacgaaacaagccaaagcagtggaggtcggccggaaggaggagaggtgctgtgctgtgtatgaagaggcagtgaagactctgccaacagaggccatgtggaagtgttacatcaccttttgcttggaaagatttactaagaagtcaaatagtgggttccttagagggaagaggttggaaagaaccatgactgtattcaggaaggcacatgaactgaagcttctgtcagaatgccaatacaagcagttgagtgtttcgttgctgtgttataacttcctgagggaagctctggaagtggcagtagctggaactgaattgtttagagactctgggacaatgtggcagctgaagctgcaggtgctgatcgagtcaaagagccctgacatagccatgctttttgaagaagcctttgtgcacctgaaaccccaggtttgtctgccattgtggatttcctgggcagagtggagtgaaggtgccaaaagccaagaagacactgaggcagtctttaagaaagctctcttagctgtcataggtgccgactcagtaaccctgaagaataagtacctggattgggcttatcgaagtggtggctacaaaaaggccagagctgtgtttaaaagtttacaggagagccgaccattttcagttgactttttcaggaaaatgattcagtttgaaaaggagcaagaatcctgcaatatggcgaacataagagaatattatgagagagctttgagagagtttggatccgcagattctgatctttggatggattatatgaaagaagaattgaaccacccccttggtagacctgagaactgtggacagatctactggcgagcgatgaaaatgttgcagggagagtcagcagaggcatttgtagctaaacatgctatgcatcagactggccatttatgaagatgaagaataccgtccgctttgtgaaatagtattgcaagccagccccgtgggcaaatttgtattgagtccatctgtaatttgctcagtgatggcagacaagatggctgtctggttttgagacacacactttaattttatgttaacttgttaaatctttttaaaaattaaaaaatttttatgattgaaaaaaaaa

SEQ ID NO: 580 - protein, 597 aa, Homo sapien
MAEIIQERIEDRLPELEQLERIGLFSHAEIKAIIKKASDLEYKIQRRTLFKEDFINYVQYEINLLELIRRRRTRIGYSFKKDEIENSIVHRVQGVFQRASAKWKDDVQLWLSYVAFCKKWATKTRLSKVFSAMLAIHSNKPALWIMAAKWEMEDRLSSESARQLFLRALRFHPECPKLYKEYFRMELMHAEKLRKEKEEFEKASMDVENPDYSEEILKGELAWIIYKNSVSIIKGAEFHVSLLSIAQLFDFAKDLQKEIYDDLQALHTDDPLTWDYVARRELEIESQTEEQPTTKQAKAVEVGRKEERCCAVYEEAVKTLPTEAMWKCYITFCLERFTKKSNSGFLRGKRLERTMTVFRKAHELKLLSECQYKQLSVSLLCYNFLREALEVAVAGTELFRDSGTMWQLKLQVLIESKSPDIAMLFEEAFVHLKPQVCLPLWISWAEWSEGAKSQEDTEAVFKKALLAVIGADSVTLKNKYLDWAYRSGGYKKARAVFKSLQESRPFSVDFFRKMIQFEKEQESCNMANIREYYERALREFGSADSDLWMDYMKEELNHPLGRPENCGQIYWRAMKMLQGESAEAFVAKHAMHQTGHL

SEQ ID NO: 581 - DNA, 2110 bp, Homo sapien
gggagtggcgtggcgcagggatggcacaaaagaaatatcttcaagcaaaattgacccagtttttaagggaagacaggattcaactttggaaacctccatatacagatgaaaataaaaaagttggtttggcattaaaggaccttgctaagcagtactctgacagactagaatgctgtgaaaatgaagtagaaaaggtaatagaagaaatacgttgcaaggcaattgagcgtggaacaggaaatgacaattatagaacaacgggaattgctacaatcgaggtgtttttaccaccaagactaaaaaaagataggaaaaacttgttggagacccgattgcacatcactggcagagaactgaggtccaaaatagctgaaacctttggacttcaagaaaattatatcaaaattgtcataaataagaagcaactacaactagggaaaacccttgaagaacaaggcgtggctcacaatgtgaaagcgatggtgcttgaactaaaacaatctgaagaggacgcgaggaaaaacttccagttagaggaagaggagcaaaatgaggccaaactcaaagaaaaacaaattcagaggaccaagagaggactagaaatactggcaaagagagcagcagagacagtggtggatccagaaatgacaccgtacttagacatagctaaccagacaggcagatcaatcagaattcccccatcagaaagaaaagcccttatgttagctatgggatatcatgagaagggcagagctttcctgaaaagaaaagaatatggaatagccttgccatgtctgttggacgctgacaaatatttctgtgagtgttgcagagagctgctggacacagtggataactatgccgtcctccagctggatatagtgtggtgttacttccgcctggaacagctggaatgccttgatgatgcagaaaaaaaattaaacttggcccagaaatgctttaaaaattgttacggagaaaatcatcagagactggtccacataaaaggaaattgtgggaaagagaaggtactgtttctaagactctacttacttcaagggatccgaaactatcacagtggaaatgatgtagaggcttatgagtatcttaacaggcacgtcagctctttaaagagctatatattgatccatcaaaagtggacaatttgttgcagttggggtttactgcccaggaagcaccggcttggcctgagggcgtgtgatgggaacgtggatcatgcggccactcatattaccaaccgcagagaggaactggcccaaataaggaaggaggaaaaagagaagaaaagacgccgcctcgagaacatcaggtttctgaaagggatgggctactccacgcacgcggcccagcagattctgctcagcaatcctcagatgtggtggttaaatgattccaatcctgaaaccgacaaccgtcaagaaagtccttcccaggaaaacattgaccgattggtgtacatgggttttgatgcactcgtggccgaagctgcgctgagagtgttcagaggcaacgtccagctggccgcccagacccttgctcacaacggaggaagcctgcctcccgagctgccgctgtcgccagaagactctttgtccccgccagccacgtccccttctgactccgcaggaacctctagtgcctcaacagacgaagacatggagacagaggccgtcaatgagatactggaagacattccagagcatgaggaagactatcttgactcaactctggaagatgaagaaattattattgcagagtacctatcctatgtagaaaataggaagtcagcaacaaagaaaaactaaataatgaacagaaatagcgctaattttctgcttataaatgctatcattatgaaaaggctaatgcagctctttctgttcttactttttatctgaattacaagtcctctttgggtgtaggagggggtgggcaggggacaagtccaggaggggtcccagggccttcatgcatggtctcggggaagaagcttcttttggcctggcgcaagccgttccatctggctcccaagtctgcgtccctaacccccttccccaactttgggggttttacccccgaaacaaggaaa

SEQ ID NO: 582 - protein, 601 aa, Homo sapien
MAQKKYLQAKLTQFLREDRIQLWKPPYTDENKKVGLALKDLAKQYSDRLECCENEVEKVIEEIRCKAIERGTGNDNYRTTGIATIEVFLPPRLKKDRKNLLETRLHITGRELRSKIAETFGLQENYIKIVINKKQLQLGKTLEEQGVAHNVKAMVLELKQSEEDARKNFQLEEEEQNEAKLKEKQIQRTKRGLEILAKRAAETVVDPEMTPYLDIANQTGRSIRIPPSERKALMLAMGYHEKGRAFLKRKEYGIALPCLLDADKYFCECCRELLDTVDNYAVLQLDIVWCYFRLEQLECLDDAEKKLNLAQKCFKNCYGENHQRLVHIKGNCGKEKVLFLRLYLLQGIRNYHSGNDVEAYEYLNRHVSSLKSYILIHQKWTICCSWGLLPRKHRLGLRACDGNVDHAATHITNRREELAQIRKEEKEKKRRRLENIRFLKGMGYSTHAAQQILLSNPQMWWLNDSNPETDNRQESPSQENIDRLVYMGFDALVAEAALRVFRGNVQLAAQTLAHNGGSLPPELPLSPEDSLSPPATSPSDSAGTSSASTDEDMETEAVNEILEDIPEHEEDYLDSTLEDEEIIIAEYLSYVENRKSATKKN

SEQ ID NO: 583 - DNA, 1584 bp, Homo sapien
gatcagagggcgatcagctggacagcaactcaggatggcatcaggcagggcacgctgcacccgaaaactccggaactgggtggtggagcaagtggagagtgggcagtttcccggagtgtgctgggatgatacagctaagaccatgttccggattccctggaaacatgcaggcaagcaggacttccgggaggaccaggatgctgccttcttcaaggcctgggcaatatttaagggaaagtataaggagggggacacaggaggtccagctgtctggaagactcgcctgcgctgtgcactcaacaagagttctgaatttaaggaggttcctgagaggggccgcatggatgttgctgagccctacaaggtgtatcagttgctgccaccaggaatcgtctctggccagccagggactcagaaagtaccatcaaagcgacagcacagttctgtgtcctctgagaggaaggaggaagaggatgccatgcagaactgcacactcagtccctctgtgctccaggactccctcaataatgaggaggagggggccagtgggggagcagtccattcagacattgggagcagcagcagcagcagcagccctgagccacaggaagttacagacacaactgaggccccctttcaaggggatcagaggtccctggagtttctgcttcctccagagccagactactcactgctgctcaccttcatctacaacgggcgcgtggtgggcgaggcccaggtgcaaagcctggattgccgccttgtggctgagccctcaggctctgagagcagcatggagcaggtgctgttccccaagcctggcccactggagcccacgcagcgcctgctgagccagcttgagaggggcatcctagtggccagcaacccccgaggcctcttcgtgcagcgcctttgccccatccccatctcctggaatgcaccccaggctccacctgggccaggcccgcatctgctgcccagcaacgagtgcgtggagctcttcagaaccgcctacttctgcagagacttggtcaggtactttcagggcctgggccccccaccgaagttccaggtaacactgaatttctgggaagagagccatggctccagccatactccacagaatcttatcacagtgaagatggagcaggcctttgcccgatacttgctggagcagactccagagcagcaggcagccattctgtccctggtgtagagcctgggggacccatcttccacctcacctctttgttcttcctgtctcctttgaagtagactcattcttcacacgattgacctgtcctctttgtgataattctcagtagttgtccgtgataatcgtgtcctgaaaatcctcgcacacactggctggtggagaactcaaggctaattttttatcctttttttttttttatttttgagatatacgccctctttcatctgtaagggactaggaaattccaaatggtgtgaacccagggggcctttccctcttccctgacctcccaactctaaagccaagcactttatatttttctcttagatattcactaaggacttaaaataaaatttttttgaaagagg

SEQ ID NO: 584 - protein, 393 aa, Homo sapien
MASGRARCTRKLRNWVVEQVESGQFPGVCWDDTAKTMFRIPWKHAGKQDFREDQDAAFFKAWAIFKGKYKEGDTGGPAVWKTRLRCALNKSSEFKEVPERGRMDVAEPYKVYQLLPPGIVSGQPGTQKVPSKRQHSSVSSERKEEEDAMQNCTLSPSVLQDSLNNEEEGASGGAVHSDIGSSSSSSSPEPQEVTDTTEAPFQGDQRSLEFLLPPEPDYSLLLTFIYNGRVVGEAQVQSLDCRLVAEPSGSESSMEQVLFPKPGPLEPTQRLLSQLERGILVASNPRGLFVQRLCPIPISWNAPQAPPGPGPHLLPSNECVELFRTAYFCRDLVRYFQGLGPPPKFQVTLNFWEESHGSSHTPQNLITVKMEQAFARYLLEQTPEQQAAILSLV

SEQ ID NO: 585 - DNA, 296 bp, Homo sapien
ataaaaaataaaaaaaagaaaattaactttggtaccaggtacaaaccagtctgggagcagatcagcaaagaaactcttgaaataaacggttaagataaaaggagtaacaaaggtgtaataccaacgcatcggcagtggcgctgaccttagaaggcttccgacagtcaatcacaatacttcaggacctatcagaggtaggatctaagcctcccagagtccccgcacgcccttgtcagcttccctgctcctctcctgatgcttcctgggatcacttccgaaataaattacttgcactt

SEQ ID NO: 586 - protein, 30 aa, Homo sapien
IKNKKKKINFGTRYKPVWEQISKETLEING

SEQ ID NO: 587 - DNA, 880 bp, Homo sapien
  unsure 7, 19, 22, 27, 33, 38, 47: unknown base
attgaanttaggtgacccnatngaagngctatnacgtngcatgcacngcgtacgtaagctcggaattcggctcgagaaaaaaaaaagtgccagcgtatgaggtaattagattggttctctccagaggtaacctgccaagaagagatgctatagatgttactcctatactgtaaaacattgtgaaatcagattactttaaaatgatgtattacaaagttatgcaaaaaagcagttgtgactatggaagcccaaggcttatatcccagctctgtcttacactaaatatgggtacagtgtttccactctgtccataaaatgggagctaatattctccaacctgtgtgcctgacatgatggttaaagggattaaacaaaacaatagtttgtaatttattctgtcagagcaaactgctggtaaataaaagggactaagttgacgaaaaataaattttaaaaaacctaataaaacaagtttgtaatttataattgtatacaaataaaagatgttacaaaaattgcgcacttatatgtatgtaccatgacataactaattcgttgaacaagttgtgagacaatcctttctgagaaaaggtagacctgttacatcgtctgtgggttagggtcatgtcagcacgtaccaggtacattctagcttttgtagagaaagtaaaatctagtgttgagtatgtaggcactgagccaggtggcctgcttaacataaaaggactgatttcagggtggctgtgggagcctttctaatgctctaattctctagccccttgcctgatccagctgattccaagagccaagattttagtctttcttggttggcttttttaaatgctttgggctttcctttaatgtatcttcaaaatcattc

SEQ ID NO: 588 - protein, 32 aa, Homo sapien
  unsure 2, 7, 9, 11, 13, 16: unknown amino acid
LXLGDPXEXLXRXMHXVRKLGIRLEKKKSASV

SEQ ID NO: 589 - DNA, 2143 bp, Homo sapien
gcgctgcagctcactttctccctgtttgctggccagcagggtttgtggccgcctctgctgtgacgccacagcctggtgaggagggggctgcagttcctcaggaaactgccagtggacaaagtcataaacaagagttccagttccctggaacctgagtcgggaggcctgcaactcactttctccctgtttgctggcccagacaggcctgtgctagagggctggatagtgtggtagtgtggtggatagagtgctgcctctatccacaacgcagccatatgctgactgaagataactttgtgtctggaagagccctctgatttcttacactaatggccttacacgagatggaggattttacatttgatggaacaaagcgcttaagtgtcaactacgtgaagggaattcttcaaccgacagacacctgtgacatctgggataagatctggaacttccaagccaagcctgatgacctgcttatttctacctatcctaaagcaggaacaacatggactcaggagatagtggaattaatacaaaatgaaggtgatgtggagaaaagtaaacgggcaccgactcatcaacgatttcctttcctcgaaatgaaaatcccatccttaggatctggtttggaacaagctcatgcaatgccctcaccacggatcctgaaaacacatcttccctttcacttgctgccaccatccttgctagagaaaaactgtaagataatctatgtagcaagaaatcccaaggacaacatggtgtcctattaccatttccaaagaatgaataaagctcttcctgctccaggaacatgggaagagtattttgagacttttctggctgggaaagtgtgctggggctcctggcatgaacatgtgaaaggatggtgggaagccaaagacaaacaccgtattctctatctcttctatgaggacatgaagaagaacccaaagcatgaaattcagaagctggcagaatttattgggaagaaattagatgacaaagttctagataaaattgtccattacacttcgtttgatgtcatgaaacagaatccaatggcaaactattcatcgattcctgctgaaatcatggaccactccatttctccattcatgagaaaaggggcagtgggagactggaagaaacacttcaccgtggctcagaatgagagatttgatgaagattacaagaagaaaatgactgataccagactaactttccacttccagttctagtaaggaagaaaaactgaaaatgttttagtttattacccagtatatttgggtaataatgaaagtttaattctcataacaaatgatatcagattccagttatcagaatagtttactgtgtttgctcttattcactctactaaaaaattattttaaaaggctggaggcaaggtggtgacaggcagcagggtggcgacatggagagagggaagctcaataaatcactaggtacaatcctggtatcattgccaattatcatcatatttacattttctacaatcatgtgcttattaacatattggaaatgcttcagtcctcacatgataatacactaacattttcagattaagttttggttcaagttaatttttttttttttttttttgagacggagtctcgctctgtcgcccaggctggagtgcagtggcacgatctcggctcactgcaagctctgcttcctgggttcacgccattcccctgcctcagcctcccgagtagctgggactatgggcgcccaccaccactcccggctaatttttttttttgtattcttagtagagacgaggtttcaccgtgttagccaggatgttctcgatctcctgaccccatgatccacccgcctcagcctagacctgctgatccagggtgtgtgtgagttgagggtgggtggaggggtttgcagtgtgggaatgtggccctgcagttgacctgagctgcttcacatggttgtccattctggggcttaaagaactgggaccagaccaagtagaggccttggtgctggttggggtggggcctgcagagtcttagttactgatttcattttcaataaatgtaggtttgttacatgagtttcccaattaaaaaaaaaatgacttcttgtccagtgcaaaaaaaaaaaaaaaaaa

SEQ ID NO: 590 - protein, 302 aa, Homo sapien
MALHEMEDFTFDGTKRLSVNYVKGILQPTDTCDIWDKIWNFQAKPDDLLISTYPKAGTTWTQEIVELIQNEGDVEKSKRAPTHQRFPFLEMKIPSLGSGLEQAHAMPSPRILKTHLPFHLLPPSLLEKNCKIIYVARNPKDNMVSYYHFQRMNKALPAPGTWEEYFETFLAGKVCWGSWHEHVKGWWEAKDKHRILYLFYEDMKKNPKHEIQKLAEFIGKKLDDKVLDKIVHYTSFDVMKQNPMANYSSIPAEIMDHSISPFMRKGAVGDWKKHFTVAQNERFDEDYKKKMTDTRLTFHFQF

SEQ ID NO: 591 - DNA, 620 bp, Homo sapien
tggagtcttttgaaaattaaagtccaggattaaattatatgttgtcaccattcaccaccactaccaccctcccccaccaatctctcccaccggttaaactcgtcttctaatcctgtagaatcacatgaactaaatgaagaagtaagaacttgaaggctcagactgacactgttacaaactagcatcttcagatgcatggtatttactttaaatgtgcttatatacagtgtagagaagctcttgtataagaagacatctatgctagctaacttagtagtagtagagggaacatattcagtgagctgcctttatatctgtagtgtcggagacttgttactggttcatttgtggttatcagttgaaggttctgttcctgagatgtgcaatagtagtgttgaaaggtattgtttaatagtgatggggaacagacatattggacttttttttccatattaaattatttagtttgcatgcctgtttgaaattggacctctcagcagcactttgaaatagttttaattaggttaacatttgcgtacactttaaataagctagcatatcgatggcttgatttcacctagatgctgttcaaatttctgaaagcacaaaggtatttcatc

SEQ ID NO: 592 - protein, 86 aa, Homo sapien [sequence omitted]

SEQ ID NO: 593 - DNA, 2950 bp, Homo sapien
gcaggctgctgtctcacagagcgagaaggtgtcaggagcagcccagttgtgtctctctctctacctctgtgaagggcgcgaatgggcagagcagaacttctagaagggaagatgagcacccaggatccctcagatctgtggagcagatccgatggagaggctgagctgctccaggacttggggtggtatcacggcaacctcacacgccatgctgctgaagctcttctcctctcaaatggatgtgacggcagctaccttctgagggacagcaatgagaccaccgggctgtactctctctctgtgagggccaaagattctgttaaacactttcatgttgaatatactggatattcatttaaatttggctttaatgaattctcatctttgaaggattttgtcaagcattttgcaaatcagcctttgattggaagcgagacaggcactctgatggttctaaaacatccctacccaagaaaagtggaagaaccctccatttatgaatctgtccgggttcacacagcaatgcagacaggaagaacagaagatgaccttgtgcccacagcaccttctctgggcaccaaagaaggttacctcaccaaacagggaggcctggtcaagacctggaaaacaagatggtttactctgcacaggaatgaactgaaatacttcaaagaccagatgtcaccagaaccaattcggatcctagacctaacagaatgttcagctgtacaattcgattattcacaagaaagggtaaactgtttttgtttggtatttccattcaggacattttatctctgtgcaaagaccggagtagaagctgatgagtggatcaagatattacgctggaaattggtcaaggacaaaagctgtattttgtctgctctctgtatatctcccgaggagaagactgatcacaaataagaaaacagctcaaccaaggggaaggcacgatccgatctcggtcgttcatctttaaatagatctttcttgccaaggaatgctctggcccaggagcaaggtggaatgtttccctgacgctgtgatctgcagcaggcttcaaatgaaaaccgactaaggattttctttcaaaaacaaatcagaagcagatgctgattgggacccatataccacgttgctgactcacgttgctgcccttccatgatgttgccatctccttgagaacactgaagcaatcaccattctgatagaaagtgcttaaaccaccactcttaggtctgctcactcttagaacacacaatggaagaggaagggtttttgttttcactcattgtggtccccaagcctattgacactagttgcctagagtcccactgtgagtcatggtcagcctgtctgacatccaggttgtgctattaaccaagaaggaaacagatacttggaggcttagatgacttctgcaggatttatattcagatagaaaacatcaaatattttcaggggagaggtttttttttttaatttttccccctttatacaaaaaaaaagaacatttccaaaactaaaatagaaaatgcttgtggcatttattttctctttttaaaaggttcagaaatttggcaggtcctttgcttctaatgacaaaactgtgagagctagatgtcctatgggcaattaggtagtataataaaggtaaatgaaggtacaatttttaaaccattattttcaccctgttggggtaaatgttttaaagagtgagaaaacataaattgagaaagggtgataaagtaatagataacttttagtttaataataattattgttattatactactaataatagagcacttgtaagcactaagttatctttatccaacatttctccaaatggactgaaagaaacttttcaaggacagtgtattataacaatccctttcccagaattagttgtatagggttggcccaagagatgtaagaaaaatctcgcattgctccctaagcaccctgggccttattaaagagcaacttctatttccagtcgggggagtaacactaaagctacaagaaatatgtaataatgataggtaataatgtgttccaaagctttttcaaactagaataaggaggcaaatagaagaatgagatactgatgtccacagttcattggcagaatctaaccccttctgttatcttttttaatactatttttgtttagatagaagtttcaaagaagataaaaatgcttgaagagcctgagagtaaaaagattatgctgcaaagctatgatataaactgctcttgcagtccaaagggatacctgattaaagaagtttcttatttaaacatctcagacgcaaaaattacattaaatttttgtatatttcaacaacattttaaatgtattttgttatgtttgtattatataggataaagcaaatgtcaagttaaaatgtattgtgttgtttgtaaagtaagaagttactggccaggagcggcggctcatgcctgtaatcccaggactttggtaggccaagacaagcagatcacttgaggtcaggagttcaacatcagcctggccaacatgatgaaaccttgtctttactaaaaatacaaaaattagctgggcatggtggcaggcgcctgtaatcccagctactcaggaggctgaggcaggagaattgcttgaacccgggaggtggaggttgcagtgaaccaagatcgcggcgctgcactctagcctgggtgacagagtcagactccgtcccaaaaaaacaaacaaacaaaacaaaacaaaaaaaacagaagttacaaatgaatactcacggatatgtatagttttatgtttgttttcttagaaacaaatgtgtttctttgggtgggtaatattgtgttttactatgtttaccttttataaaacataacctgtttatttatattctttggctttgtttattaaaaagcatgattttgctgtgcatgtaccattttg

SEQ ID NO: 594 - protein, 280 aa, Homo sapien
MGRAELLEGKMSTQDPSDLWSRSDGEAELLQDLGWYHGNLTRHAAEALLLSNGCDGSYLLRDSNETTGLYSLSVRAKDSVKHFHVEYTGYSFKFGFNEFSSLKDFVKHFANQPLIGSETGTLMVLKHPYPRKVEEPSIYESVRVHTAMQTGRTEDDLVPTAPSLGTKEGYLTKQGGLVKTWKTRWFTLHRNELKYFKDQMSPEPIRILDLTECSAVQFDYSQERVNCFCLVFPFRTFYLCAKTGVEADEWIKILRWKLVKDKSCILSALCISPEEKTDHK

SEQ ID NO: 595 - DNA, 609 bp, Homo sapien
ggtgtggtagccggcgccgcgcccatagccggacggggatctgagctggcaggatgaatgtgggggtggcacacagcgaagtaaaccccaacacccgagtgatgaatagccgaggcatctggctggcctacatcatcttggtaggattgctgcatatggttctactcagcatccccttcttcagcattcctgttgtctggaccctgaccaacgtcatccataacctggctacgtatgtcttccttcatacggtgaaagggacaccctttgagactcctgaccaaggaaaggctcggctactgacacactgggagcaaatggactatgggctccagtttacctcttcccgcaagttcctcagcatctctcctattgtgctctatctcctggccagcttctataccaagtatgatgctgcgcacttcctcatcaacacagcctcattgctaagtgtactgctgccgaagttgccccagttccatggggttcgtgtctttggcatcaacaaatactgagggatgggttttgggacagctccatgggcatggggaaggcactgaaacagaggactataaaacaccaaaaaaaaaaaaaaaaaaaaaaaaaaaa

SEQ ID NO: 596 - protein, 153 aa, Homo sapien
MNVGVAHSEVNPNTRVMNSRGIWLAYIILVGLLHMVLLSIPFFSIPVVWTLTNVIHNLATYVFLHTVKGTPFETPDQGKARLLTHWEQMDYGLQFTSSRKFLSISPIVLYLLASFYTKYDAAHFLINTASLLSVLLPKLPQFHGVRVFGINKY

SEQ ID NO: 597 - DNA, 940 bp, Homo sapien
cgctcattcctgaccccgcagtgggcgcgatggcggaggctgtactgagggtcgcccggcggcagctgagccagcgcggcgggtctggagcccccatcctcctgcggcagatgttcgagcctgtgagctgcaccttcacgtacctgctgggtgacagagagtcccgggaggccgttctgatcgacccagtcctggaaacagcgcctcgggatgcccagctgatcaaggagctggggctgcggctgctctatgctgtgaatacccactgccacgcggaccacattacaggctcggggctgctccgttccctcctccctggctgccagtctgtcatctcccgccttagtggggcccaggctgacttacacattgaggatggagactccatccgcttcgggcgcttcgcgttggagaccagggccagccctggccacaccccaggctgtgtcaccttcgtcctgaatgaccacagcatggccttcactggagatgccctgttgatccgtgggtgtgggcggacagacttccagcaaggctgtgccaagaccttgtaccactcggtccatgaaaagatcttcacacttccaggagactgtctgatctaccctgctcacgattaccatgggttcacagtgtccaccgtggaggaggagaggactctgaaccctcggctcaccctcagctgtgaggagtttgtcaaaatcatgggcaacctgaacttgcctaaacctcagcagatagactttgctgttccagccaacatgcgctgtggggtgcagacacccactgcctgatctcacttctgtcagatgctcccatccactattaatgcactaggtgggaggagagggcggcaatgacactgcacctctcctttcccaccgcattccctggagctccctaaataaaactttttttaacgtgaaaaaaaaaaaaaaaa

SEQ ID NO: 598 - protein, 254 aa, Homo sapien
MAEAVLRVARRQLSQRGGSGAPILLRQMFEPVSCTFTYLLGDRESREAVLIDPVLETAPRDAQLIKELGLRLLYAVNTHCHADHITGSGLLRSLLPGCQSVISRLSGAQADLHIEDGDSIRFGRFALETRASPGHTPGCVTFVLNDHSMAFTGDALLIRGCGRTDFQQGCAKTLYHSVHEKIFTLPGDCLIYPAHDYHGFTVSTVEEERTLNPRLTLSCEEFVKIMGNLNLPKPQQIDFAVPANMRCGVQTPTA

SEQ ID NO: 599 - DNA, 1778 bp, Homo sapien
ggctgttgagcttggtgatgaactacaaatagatgccatagatgatcaaaaatgtgatattttggttcaggaagaacttctagcttcacctaagaaactcttagaagatactttatttccttcctcaaagaagctcaagaaagacaaccaagagagctcagacgctgagcttagtagtagtgagtacataaaaacagatttggatgcgatggatattaagggccaggaatcaagcagtgatcaagagcaggttgatgtggaatccattgattttagcaaagagaacaaaatggacatgactagtccagagcagtctagaaatgtgctacagtttactgaagaaaaagaagcttttatctctgaagaggagattgcaaaatacatgaagcgtggaaaaggaaagtattattgcaaaatttgttgctgtcgtgctatgaaaaaaggtgctgttttgcatcatttggttaataagcataatgttcatagcccttacaaatgcacaatctgtggaaaggcttttcttttggaatctctccttaaaaatcatgtagcagcccatgggcaaagtttacttaaatgtccacgttgtaattttgaatcaaatttcccaagaggttttaagaaacatttaactcattgtcaaagccggcataatgaagaggcaaataaaaagctaatggaagctcttgaaccgccactggaggagcagcaaatttgataacacagtgtgaatatttgttctacaaaggtgtttgttggaaccattctttgtaagtatagcttatcagatagcatagttggatcagtagatgacatgtatggtgtaccgtgtttcactgtctcagttgtgttactaagaatgagcatttgatcatttttttctggtctctgtctatgtgactatcttgtaagtcaataaatttctgtatagtccagatggattaaacttctcatttcttttaaatatgtatgaataataatacaaggaagtaggcattccatttaataatcaagagcaagttgtactcaaagcattcagttaaagtgtatctgtgtgtggaactaatttcagacaatagaaaatattagttgaaatgtttaagaattaggcatgaaaaataaatttgagaaattttgtttccttacatgtatttttaaatcataagagttattttctatctgatgtaaaattagtttataaatcttaatcagcttctagatgtttattagcttttatgtcatgaaatgttggagtctcagggttgctgattttctgctaatgggaaaaattgactaagtctttaaaatagtttgcagccttctcccacaggagacaagtgaaagataagtgtgattttagatctttcttgtccatagttgttttcagtggagtcttccattctgtatcttaccctaagatctggttcttccctccccatccccaccccccacccaccgcctgccagctcacactaatagatgattcttaattgccaaatgtgttagagtttgtatatcctactcctgggccttacatgtcgcctgttggggcttaagaccaggttgataagtaggaactgaaagtcttccagattcacagtagaaaattttatagacatttctgttaaagaaatatatcgattttatgtttttcaattatgttactgtaaataccttgtacctgttcatggattattttattctaaaatattttgtcaaatgtgtatcaaccaaattaaaaagaaaggttttcatgtcaaaaaaaaaaaaaaaaaaaa

SEQ ID NO: 600 - protein, 238 aa, Homo sapien
AVELGDELQIDAIDDQKCDILVQEELLASPKKLLEDTLFPSSKKLKKDNQESSDAELSSSEYIKTDLDAMDIKGQESSSDQEQVDVESIDFSKENKMDMTSPEQSRNVLQFTEEKEAFISEEEIAKYMKRGKGKYYCKICCCRAMKKGAVLHHLVNKHNVHSPYKCTICGKAFLLESLLKNHVAAHGQSLLKCPRCNFESNFPRGFKKHLTHCQSRHNEEANKKLMEALEPPLEEQQI

SEQ ID NO: 601 - DNA, 2690 bp, Homo sapien
ggccctcgggccaagattcggcacgaggcgaacggagcagctgctgcagcagggcccatggcggacacccagtacatcctgcccaatgacatcggcgtgtctagcctggactgccgtgaggccttccgcctgctgtcacccacagagcgcctctatgcctaccacctgtcccgtgccgcctggtacggaggcctggctgtgctgcttcagacctcccctgaggccccctacatctatgctctgctcagccgcctcttccgcgcccaggaccccgaccagctgcgccaacatgccctggctgaaggccttaccgaggaggagtatcaggcgttcctggtctatgccgcgggtgtttactccaacatgggcaactacaagtcctttggtgacaccaagtttgttcccaacttgcccaaggaaaagctggaacgggtgatcctagggagtgaggctgctcagcagcacccagaagaagtcaggggcctctggcatacctgcggggagcttatgttctctctggagccaaggcttcgacacctcggactggggaaggagggaatcaccacctatttctctgggaattgtaccatggaagatgccaaattggcccaggactttctggactcacagaacctcagtgcctacaacacccggctcttcaaagaggtcgatggagaagggaagccctactacgaggtgcggctggcttctgtgcttggctcagagccttccctggactctgaggtgacttccaagctgaagagctatgaattccggggaagccctttccaggtgacccggggggactacgcgcccatcctccagaaggtggtggagcagctggagaaagccaaggcctatgcagccaacagccaccaggggcagatgctggcccagtatatagagagcttcacccagggctccatcgaggcccacaagaggggctcccgcttctggatccaggacaaaggccccatcgtggagagttacatcgggttcatcgagagctaccgcgacccctttggttcccgaggagaatttgaaggtttcgtagctgtggtgaacaaggccatgagtgccaagtttgagcggctggtggcgagcgcagagcagctgctgaaggagctgccctggcccccaacctttgagaaggacaagttcctcacccctgacttcacctccctggatgttctcaccttcgctggctccggcatccctgccggcatcaacatccccaactacgatgatctgaggcagacggaaggctttaagaacgtgtcgctggggaatgtgctggctgtggcctacgccacgcagcgggagaagcttacctttctggaggaggatgacaaggacctgtacatcctctggaaggggccctccttcgatgtgcaggtgggcctgcacgagctgctgggccatggcagtggcaagctcttcgtacaggacgaaaaaggagcattcaactttgaccaggaaacagtgatcaacccagagacgggcgagcagattcagagctggtatcggagcggggagacctgggatagcaagttcagcaccatcgcctccagctacgaagagtgccgggctgagagcgtgggtctctacctctgtctccacccgcaagtgctggagatctttggctttgagggggctgatgcggaggacgtgatctacgtgaactggctcaacatggttcgggccgggctgctcgctctggagttctacacacctgaggccttcaactggcgacaggcccatatgcaggcccggtttgtgatcctgagagtcttgctggaggctggcgagggactcgttaccatcactcccaccacaggctccgatgggcgcccagatgcccgggtccgcctcgaccgcagcaagatccggtctgtgggcaagcctgctctagagcgcttcctgcggagacttcaggtgctgaagtccacaggggatgtggccggagggcgggccctgtacgaggggtatgcaacggtcactgatgcgccccccgagtgcttcctcaccctcagggacacggtgctgctgcgtaaggaatctcggaagctcattgttcagcccaacactcaccttgaaggctcagacgtgcagcttctggaatacgaggcgtcagctgctggcctcatccgatccttctctgagcgtttcccagaggatggacccgagttggaggagatcctcacacagctggccacagccgatgcccgattctggaagggccccagtgaggccccatctggccaagcttgaggaagatgtgtggccttgcccccaattccatcagaccaaggctgcaagtggccctccattcgtgtgtgtatttaggggctggggagggggaggggcaggagcttggaccttggtactacctcagctgagggtggtgacacaaccccttccatttgtcagcactttccagcctgccaattgcttcccctctgtgatctcatttcatctgcactgccatacgtggagtgagcaagacagggcttaccatcctgtctaccagatgaggaaatggcagttctgagaagtcactggtctagatcccgcaggtggcacgtgacagctagggttcaaaacgttctcaccaaatccaatgctcctcacatattaattttataaccagacaaataaatattagagacaaccaccaaaaaaaaaaaaaa

SEQ ID NO: 602 - protein, 737 aa, Homo sapien
MADTQYILPNDIGVSSLDCREAFRLLSPTERLYAYHLSRAAWYGGLAVLLQTSPEAPYIYALLSRLFRAQDPDQLRQHALAEGLTEEEYQAFLVYAAGVYSNMGNYKSFGDTKFVPNLPKEKLERVILGSEAAQQHPEEVRGLWHTCGELMFSLEPRLRHLGLGKEGITTYFSGNCTMEDAKLAQDFLDSQNLSAYNTRLFKEVDGEGKPYYEVRLASVLGSEPSLDSEVTSKLKSYEFRGSPFQVTRGDYAPILQKVVEQLEKAKAYAANSHQGQMLAQYIESFTQGSIEAHKRGSRFWIQDKGPIVESYIGFIESYRDPFGSRGEFEGFVAVVNKAMSAKFERLVASAEQLLKELPWPPTFEKDKFLTPDFTSLDVLTFAGSGIPAGINIPNYDDLRQTEGFKNVSLGNVLAVAYATQREKLTFLEEDDKDLYILWKGPSFDVQVGLHELLGHGSGKLFVQDEKGAFNFDQETVINPETGEQIQSWYRSGETWDSKFSTIASSYEECRAESVGLYLCLHPQVLEIFGFEGADAEDVIYVNWLNMVRAGLLALEFYTPEAFNWRQAHMQARFVILRVLLEAGEGLVTITPTTGSDGRPDARVRLDRSKIRSVGKPALERFLRRLQVLKSTGDVAGGRALYEGYATVTDAPPECFLTLRDTVLLRKESRKLIVQPNTHLEGSDVQLLEYEASAAGLIRSFSERFPEDGPELEEILTQLATADARFWKGPSEAPSGQA

SEQ ID NO: 603 - DNA, 1175 bp, Homo sapien
cccgctctcaggcactgctggagaaccgagaccgacttctttctctttaccctcattggcgcttctctcctgcagtccgcctctgggccctgccgcatttcttgagacttaaagtggcattctaaaggcaatttaaaaatcatgtcaagctcagttgaacagaaaaaagggcctacaagacagcgcaaatgtggcttttgtaagtcaaatagagacaaggaatgtggacagttactaatatctgaaaaccagaaggtggcagcgcaccataagtgcatgctcttttcatctgctttggtatcatcacactctgataatgaaagtcttggtggattttctattgaagatgtccaaaaggaaattaaaagaggcacgaagctgatgtgttctttgtgccattgtcctggagcaacaattggttgtgatgtgaaaacatgtcacaggacataccactaccactgtgcattgcatgataaagctcaaatacgagagaaaccttcacaaggaatttacatggcctattgccgaaaacacaagaaaactgcacataactccgaagcagctgatttagaagaaagttttaatgaacatgaactggagccctcatcacctaaaagtaaaaagaaaagtcgcaaaggaaggccaagaaaaactaattttaaagggctgtcagaagataccaggtccacatcctcccatggaacagatgaaatggaaagtagttcctatagagataggtctccacacagaagcagccctagtgacaccaggcctaaatgtggattttgccatgtaggggaggaagaaaatgaagcacgaggaaaactgcatatatttaatgccaagaaggcagctgcccattataagtgcatgttgttttcttctggcacagtccagctcacaacaacatcaagagcagaatttggagactttgatattaaaactgtacttcaggagattaaacgaggaaaaagaatggtctgtagtttttatatttgttatgcaacattacacttgatttgctgctttaaatttagagtacatcccaaatttatccagtcatcagaaaatttaaagtagttcgtatgttaaagcaaagtatatatttgacttatttgtaatataataaaggatgctgatgttacggaaaaaaaaaaaaaaaaaaaaaaaaaaaa

SEQ ID NO: 604 - protein, 312 aa, Homo sapien
MSSSVEQKKGPTRQRKCGFCKSNRDKECGQLLISENQKVAAHHKCMLFSSALVSSHSDNESLGGFSIEDVQKEIKRGTKLMCSLCHCPGATIGCDVKTCHRTYHYHCALHDKAQIREKPSQGIYMAYCRKHKKTAHNSEAADLEESFNEHELEPSSPKSKKKSRKGRPRKTNFKGLSEDTRSTSSHGTDEMESSSYRDRSPHRSSPSDTRPKCGFCHVGEEENEARGKLHIFNAKKAAAHYKCMLFSSGTVQLTTTSRAEFGDFDIKTVLQEIKRGKRMVCSFYICYATLHLICCFKFRVHPKFIQSSENLK

SEQ ID NO: 605 - DNA, 1987 bp, Homo sapien
ctcgagagctccgccatggccgctctcacccgggacccccagttccagaagctgcagcaatggtaccgcgagcaccgctccgagctgaacctgcgccgcctcttcgatgccaacaaggaccgcttcaaccacttcagcttgaccctcaacaccaaccatgggcatatcctggtggattactccaagaacctggtgacggaggacgtgatgcggatgctggtggacttggccaagtccaggggcgtggaggccgcccgggagcggatgttcaatggtgagaagatcaactacaccgagggtcgagccgtgctgcacgtggctctgcggaaccggtcaaacacacccatcctggtagacggcaaggatgtgatgccagaggtcaacaaggttctggacaagatgaagtctttctgccagcgtgtccggagcggtgactggaaggggtacacaggcaagaccatcacggacgtcatcaacattggcattgtcggctccgacctgggacccctcatggtgactgaagcccttaagccatactcttcaggaggtccccgcgtctggtatgtctccaacattgatggaactcacattgccaaaaccctggcccagctgaacccggagtcctccctgttcatcattgcctccaagacctttactacccaggagaccatcacgaatgcagagacggcgaaggagtggtttctccaggcggccaaggatccttctgcagtggcgaagcactttgttgccctgtctactaacacaaccaaagtgaaggagtttggaattgaccctcaaaacatgttcgagttctgggattgggtgggaggacgctactcgctgtggtcggccatcggactctccattgccctgcacgtgggttttgacaacttcgagcagctgctctcgggggctcactggatggaccagcacttccgcacgacgcccctggagaagaacgcccccgtcttgctggccctgctgggtatctggtacatcaactgctttgggtgtgagacacacgccatgctgccctatgaccagtacctgcaccgctttgctgcgtacttccagcagggcgacatggagtccaatgggaaatacatcaccaaatctggaacccgtgtggaccaccagacaggccccattgtgtggggggagccagggaccaatggccagcatgctttttaccagctcatccaccaaggcaccaagatgataccctgtgacttcctcatcccggtccagacccagcaccccatacggaagggtctgcatcacaagatcctcctggccaacttcttggcccagacagaggccctgatgaggggaaaatcgacggaggaggcccgaaaggagctccaggctgcgggcaagagtccagaggaccttgagaggctgctgccacataaggtctttgaaggaaatcgcccaaccaactctattgtgttcaccaagctcacaccattcatgcttggagccttggtcgccatgtatgagcacaagatcttcgttcagggcatcatctgggacatcaacagctttgaccagtggggagtggagctgggaaagcagctggctaagaaaatagagcctgagcttgatggcagtgctcaagtgacctctcacgacgcttctaccaatgggctcatcaacttcatcaagcagcagcgcgaggccagagtccaataaactcgtgctcatctgcagcctcctctgtgactcccctttctcttctcgtccctcctccccggagccggcactgcatgttcctggacaccacccagagcaccctctggttgtgggcttggaccacgagcccttagcagggaaggctggtctcccccagcctaacccccagcccctccatgtctatgctccctctgtgttagaattggctgaagtgtttttgtgcagctgacttttctgacccatgttcacgttgttcacatcccatgtagaaaaacaaagatgccacggaggaggt

SEQ ID NO: 606 - protein, 558 aa, Homo sapien [sequence omitted]

SEQ ID NO: 607 - DNA, 981 bp, Homo sapien
  unsure 342-416: unknown base
gtgtatttgcatattttaagtatctaccatctaatatttattaatacaattttttcttaatttcttagacttgtgactatttgaaacaaattataacactgtattgtaggatttataatttgtagttgtaaaatttataacacatggaataagaagataaatggaactgttctgtagcaaatttttcatgttttatatttaagacagtatagtattaactctaaaagtatggtggatatgttaaagattcatattgtattccctgcagcaaccactaaaaaatgcaaagaagtgtaatgtaaatgctaaaaaaggagataattataaaatatttatttgcannnnnnnnnnnnnnnnnnnnnnnnnnnnnnnnnnnnnnnnnnnnnnnnnnnnnnnnnnnnnnnnnnnnnnnnnnnctaattgtatagcttttagaacaaaatacagctcaggaatatgaaaaaccaagcacacatcctggataaaattcataaacctgctcaatgagagaaaagttggacacaaaattgtactttatgtattttgtattttattccaggcaaaataatcctatggtgaaaaaaaatcaacaagataatctctgcatgagaaaaaggaccaaagacaagtgaattttctgagggtgatgaaagtgttgcttcgaaaaggggtgaagtttatatgggtctatttatttgtctaacatgtacagttaaggtttatgccttgcaatgtatgtacatcttcacaaaaaaaatcttaaaaaaattaaatgggtgggggtagggaaagggttgaagtatagatgaagcagaagtggtacatgattagtagttgaagctgggggcaggtctatatattttatttttatgtctttaatagcatttgtataaatgtacaatattcgtttacaatgttagctcaggatcttgtttacctttggacagggagggagggagaaatttattttctgggtaggag

SEQ ID NO: 608 - protein, 22 aa, Homo sapien
MLAQDLVYLWTGREGEIYFLGR

SEQ ID NO: 609 - DNA, 2961 bp, Homo sapien
gcggccgcggaggaggaggaaggggaggagggcgaggcgggaggtgcaggagggaccctcgccatgggtccacgggcctagagtggcggaagataccggcctggtgccaaactggctactgctgcttcctgtggcctccatggctgaggactggctggactgcccggccctgggccctggctggaagcgccgcgaagtctttcgcaagtcaggggccacctgtggacgctcagacacctattaccagagccccacaggagacaggatccgaagcaaagttgagctgactcgatacctgggccctgcgtgtgatctcaccctcttcgacttcaaacaaggcatcttgtgctatccagcccccaaggcccatcccgtggcggttgccagcaagaagcgaaagaagccttcaaggccagccaagactcggaaacgtcaggttggaccccagagtggtgaggtcaggaaggaggccccgagggatgagaccaaggctgacactgacacagccccagcttcattccctgctcctgggtgctgtgagaactgtggaatcagcttctcaggggatggcacccaaaggcagcggctcaaaacgttgtgcaaagactgtcgagcacagagaattgccttcaaccgggaacagagaatgtttaagcgtgtgggctgtggggagtgtgcagcctgccaggtaacagaagactgtggggcctgctccacctgcctcctgcagctgccccatgatgtggcatcggggctgttctgcaagtgtgaacggagacgctgcctccggattgtggaaaggagccgagggtgtggagtatgccggggctgtcagacccaagaggattgtggccattgccccatctgccttcgccctccccgccctggtctcaggcgccagtggaaatgtgtccagcgacgttgcctacggggtaaacatgcccgccgcaagggaggctgtgactccaagatggctgccaggcggcgccccggagcccagccactgcctccaccacccccatcacagtccccagagcccacagagccgcaccccagagccctggccccctcgccacctgccgagttcatctattactgtgtagacgaggacgagctacagccctacacgaaccgccggcagaaccgcaagtgcggggcctgtgcagcctgcctacggcggaatggatgtggccgctgcgacttctgctgcgacaagcccaaattcgggggcagcaaccagaagcgccagaagtgtcgttggcgccaatgcctgcagtttgccatgaagcggctgctgcccagtgtctggtcagagtctgaggatggggcaggatcgcccccaccttaccgtcgtcgaaagaggcccagctctgcccgacggcaccatcttggccctaccttgaagcccaccttggctacacgcacagcccaaccagaccatacccaggctccaacgaagcaggaagcaggtggtggctttgtgctgcccccgcctggcactgaccttgtgtttttacgggaaggcgcaagcagtcctgtgcaggtgccgggccctgttgcagcttccacagaagccctgttgcaggaggcccagtgctctggcctgagttgggttgtggccttaccccaggtgaagcaagagaaggcggatacccaggacgagtggacaccaggcacagctgtcctgacttctcccgtattggtgcctggctgccctagcaaggcagtagacccaggcctgccttctgtgaagcaagagccacctgacccagaggaggacaaggaggagaacaaggatgattctgcctccaaattggccccagaggaagaggcaggaggggctggcacacccgtgatcacggagattttcagcctgggtggaacccgcttccgagatacagcagtctggttgccaaggtccaaagaccttaaaaaacctggagctagaaagcagtagactggaggcttctacagactgtaggattcaagtctgcagggcaggcactcgggaagggaagatggatgtaaagtgtgggagaccgaggacacagtggagcccacgagcacgagctggaacccacgaggatggcctggaacccatgtcagtctctcaccacctccagcttcgatgatgtgggtgtcctgcagaagaagctggtgcccttcctcacagagttaaatatgcatctggcccaggaattagagaagctgaaaggatgatcctggggaaggtggagcagctgcaggcctggctgcaggcctgactactgcccacaccaacgaggtgatctagcagatacatggcaacgtgtgaactgcaacaacgcctggtgccccagcaccaaccttccaagtgtaaaaacaatgtgctgctgcttcacttccgccctccggttatcaagcaaaatgtctcttgtggcccatcttactggaagagagttccgggaaacatagcctcaccaaggtgacacattacaaagccaccctaccatgaatccgctcccaagggtctcactgctcacctgaggataactcaatataactatgttgctgaaaatgcaaagctgaagaccatggatttcatggtgattccagcaagtacagagattctatgaagcccacccagaaaaaacttgctggtcctggctatttttgtgtcatttattcaagtattgagaacctggcctgtggtaggcactgtacttaatactaggatacagaaatgcaaaagatacggcccatgcaattttattaaatgcatcaatatgtattacaaatggtgaatggatttccaactttatcatggaatttaatgctgaatatatagaattcagaaaattgttgggaggacagcccttttgtgaaccttgtttggggcacagtaggaattggaaataatttagtttctatctctaagctgttctattttaaaattatttttaaatttttattgtcccactt

SEQ ID NO: 610 - protein, 605 aa, Homo sapien [sequence omitted]

SEQ ID NO: 611 - DNA, 439 bp, Homo sapien
cccattgtgtcggacaattatttctagagtctttttccaaacagaattgaacaatgccacaaaaactttctttactaaagaatatttgaaaataaaacaaagctttcagaaatccaactctgcaaaatggcccctaccaagctgcagaaaagcatttcatctttttggaggtttccgcagacatgcagctccagttacaagaaggcagttcccacacggtgcacacaggatggattacctgcactttgaggatgatagcccgtggatggtggtttgacatggatatggtgatcatatatatttattcagtgaactgggtcattggattcattgttttctgctttttttgctattttttctttccgttttaggaatttcataccttactacaattgaccaatcataaatgatgtaaataacaattgcttaaacaattttt

SEQ ID NO: 612 - protein, 91 aa, Homo sapien
PLCRTIISRVFFQTELNNATKTFFTKEYLKIKQSFQKSNSAKWPLPSCRKAFHLFGGFRRHAAPVTRRQFPHGAHRMDYLHFEDDSPWMVV

SEQ ID NO: 613 - DNA, 1501 bp, Homo sapien
agaagttaggggctgcagcggcgctggctttaggtgaacgacgtggtgaggagtgggtttcgggcatgagaagtcacagggccgtttcctagtctctcttcacttctttgggtcttctcagagaaagaaggctgccgtgggtaggctgggggcggagactatcgggaagagaaaattacttttcccactgaaacacacccaagtatatgcccagccttcatgaaagtgaacagagaaacgaagcgcctttatgtgggtggccttagccaggacatttctgaggcagacctacaaaatcagttcagcagatttggagaagtttcggatgtggagatcatcacacggaaagatgaccaaggaaacccacagaaagtttttgcatatatcaacatcagtgtagcagaagcggacctgaaaaaatgtatatctgttttaaataaaacaaaatggaaaggtggaacattacaaattcaactagcaaaagaaagctttctgcacagattggcccaagagagagaagcagcaaaagctaagaaagaagaatcaacaacaggtaacgccaacttgttagaaaagacaggaggagtggatttccatatgaaagctgtgccagggacagaagtgccagggcataagaattgggttgtgagcaaatttggaagagtcttacctgttcttcaccttaaaaatcaacataaacgtaaaatcatcaaatatgatccctcaaagtactgccacaacctgaagaagataggggaggatttctcaaacaccattcctatatccagcctgacttgggaattagaaggagggaatgaccctatgagtaagaaacggcgaggagagttctctgactttcatggccctcccaagaagataataaaagtgcagaaggatgagagttccactgggtctctggccatgagtacaaggcccaggagggtaatagagagaccacccttaacacagcaacaggctgcacaaaaaagaacttgtgattccattactccttctaaatcatctcctgtacctgtttctgatactcagaaacttaaaaatctaccttttaagacttctggcttggaaactgccaagaagagaaacagcatttctgatgatgatactgattctgaagatgaattgagaatgatgattgcgaaagaggaaaacttacagagaactacacaaccctcaataaatgaatctgaaagtgatccttttgaagttgtaagggatgatttcaaatcaggcgttcacaaactgcattctttaataggtttaggtatcaaaaatcgtgtctcttgccatgatagtgatgatgatattatgagaaatgatcgtgagtatgactcaggagatacagatgaaattattgcgatgaaaaaaaatgttgctaaggtcaaaaacagtacagaattttcacaaatggaaaaatctacgaagaaaacttctttcaaaaatagagaaaactgtgagctttctgatcactgtattaaactac

SEQ ID NO: 614 - protein, 427 aa, Homo sapien
MKVNRETKRLYVGGLSQDISEADLQNQFSRFGEVSDVEIITRKDDQGNPQKVFAYINISVAEADLKKCISVLNKTKWKGGTLQIQLAKESFLHRLAQEREAAKAKKEESTTGNANLLEKTGGVDFHMKAVPGTEVPGHKNWVVSKFGRVLPVLHLKNQHKRKIIKYDPSKYCHNLKKIGEDFSNTIPISSLTWELEGGNDPMSKKRRGEFSDFHGPPKKIIKVQKDESSTGSLAMSTRPRRVIERPPLTQQQAAQKRTCDSITPSKSSPVPVSDTQKLKNLPFKTSGLETAKKRNSISDDDTDSEDELRMMIAKEENLQRTTQPSINESESDPFEVVRDDFKSGVHKLHSLIGLGIKNRVSCHDSDDDIMRNDREYDSGDTDEIIAMKKNVAKVKNSTEFSQMEKSTKKTSFKNRENCELSDHCIKL

SEQ ID NO: 615 - DNA, 2186 bp, Homo sapien
cttatgcatcggatttatttttccaaatcaagaggacagtgatagatgcattttccccaggctgtctcagaaaggtcgctaaatgtatactgttgtcagaattgctgagatctccccccactttggtttttgcagcagtaaaaactctttccactgtgacttattttccccaggctgtctcagaaaggtcgctaaatgtatactgttgtcagaattgctgagatctccccccacttttggtttttgcagcagtaaaaactctttccactgtgacttattttctctctcaggcagccagccacctggtcccttgtgctgactctagcacagtggccaggatccaatacgagtccaggggtgaccgcaggatggtgggggcagcgggcttctccacctaccccagccaccaaggccctgacgcactgcctcctgcaccttcagcacatccctgtgcacagctggaagggtgcatggcccgctcacctttgttcagatgggtggaaacgctgatgataccagctcctcctgccgtgcccctgccacggagcaggcattgtgaactggctggtgtttgcagtcccacgtggcatggcctccagcccaacccacagtggagactggagacagggcaatgagtctggtcgggggcacgtggacatgccccataggggccccacccagacttaacaggcaaggtcctgggcattgcgcgacgcaggactcaatgctaaagcaagcctgcctggctctgtgccagggcccctcttctgatttacacatcccatttttacacagacccttccttcttaataaaggctgacagttctgttggcagccaagaacccacaccatgaagacagggagtgaggggcctttgtgcccaactccagcacagctgcgttctggggtgtgtgagaggcatgttcgtgtctgtgcgctggtggtctcgtgagacagttccgaggacggggaaattgcagggtggtgggggcgtgaggcttatatgtggaactgatgcagagttcgcctgcagacggatctggatatacactatgtataattgttacgtgtaatttaaaatatatctgtttgccatcgtcatgagaagattatatgtaaggctctgaagggagagggagatgtacattctgccaggctcctggggaccttatccgagtcatgaaattgatgactgttgatccagtggtgcaagaagctacactccatgtgtcatcacgcttatgactcctaatgtatttttaaggcaaaaaatgtcagccgactccatcttcacccctcgattcctcgagtccagcctttctgtgccagtgcttcactgagccacaacgctctcgccatcgggacccggctgggcctggagtctcggggcacagttgccatggagccctcctgggtcattctacaaatgtgctgagtgccagctgaaaaccccacaggagatggagtaccttggccaagcttaaagagaagattttctcagggtatttattagtgtgtccagcagggtcaggaagcaggatggaaagatgcattcagactgttaatttattaacaaggcaaatgattttgtgtttcttgatgacagactattaagtttgggacttattttcccatttgagaagttataatatatatttaagatgataagtttcctgcttaagttgtgcctttcagcttcaatgagtttaaggagcactaagggtaatgataccaatgagggttggtttattatcaaacctgaatagctgtggtttctccagtaaatattttcttctactgaacatggagccattattaagagttgtgtgttttttattatgtacatttgtatatttttttgcttgtttgatgttctatttttctaatagttttcttttagtttcttaaagttgtgatactagatttagattctgatgctaactgcaaatcaggttggtctctgctgggtctctcctgcttttattttactttaaggacaagtgtagttgtcgtccaccacctttcaaaaaatgtgaaactgccctgcctcccctttttgctgacaacactgtgtacattgaccacttcctaccatactttatgttgtaaaatcaaactcttttgtggtacattatctcatgcttctgcaaattcgaataaattctatggcttccatgtgaaaaaaa

SEQ ID NO: 616 - protein, 152 aa, Homo sapien [sequence omitted]

SEQ ID NO: 617 - DNA, 2121 bp, Homo sapien
ctgctcgcggccgccaccgccgggccccggccgtccctggctcccctcctgcctcgagaagggcagggcttctcagaggcttggcgggaaaaaagaacggagggagggatcgcgctgagtataaaagccggttttcggggctttatctaactcgctgtagtaattccagcgagaggcagagggagcgagcgggcggccggctagggtggaagagccgggcgagcagagctgcgctgcgggcgtcctgggaagggagatccggagcgaatagggggcttcgcctctggcccagccctcccgcttgatcccccaggccagcggtccgcaacccttgccgcatccacgaaactttgcccatagcagcgggcgggcactttgcactggaacttacaacacccgagcaaggacgcgactctcccgacgcggggaggctattctgcccatttggggacacttccccgccgctgccaggacccgcttctctgaaaggctctccttgcagctgcttagacgctggatttttttcgggtagtggaaaaccagcagcctcccgcgacgatgcccctcaacgttagcttcaccaacaggaactatgacctcgactacgactcggtgcagccgtatttctactgcgacgaggaggagaacttctaccagcagcagcagcagagcgagctgcagcccccggcgcccagcgaggatatctggaagaaattcgagctgctgcccaccccgcccctgtcccctagccgccgctccgggctctgctcgccctcctacgttgcggtcacacccttctcccttcggggagacaacgacggcggtggcgggagcttctccacggccgaccagctggagatggtgaccgagctgctgggaggagacatggtgaaccagagtttcatctgcgacccggacgacgagaccttcatcaaaaacatcatcatccaggactgtatgtggagcggcttctcggccgccgccaagctcgtctcagagaagctggcctcctaccaggctgcgcgcaaagacagcggcagcccgaaccccgcccgcggccacagcgtctgctccacctccagcttgtacctgcaggatctgagcgccgccgcctcagagtgcatcgacccctcggtggtcttcccctaccctctcaacgacagcagctcgcccaagtcctgcgcctcgcaagactccagcgccttctctccgtcctcggattctctgctctcctcgacggagtcctccccgcagggcagccccgagcccctggtgctccatgaggagacaccgcccaccaccagcagcgactctgaggaggaacaagaagatgaggaagaaatcgatgttgtttctgtggaaaagaggcaggctcctggcaaaaggtcagagtctggatcaccttctgctggaggccacagcaaacctcctcacagcccactggtcctcaagaggtgccacgtctccacacatcagcacaactacgcagcgcctccctccactcggaaggactatcctgctgccaagagggtcaagttggacagtgtcagagtcctgagacagatcagcaacaaccgaaaatgcaccagccccaggtcctcggacaccgaggagaatgtcaagaggcgaacacacaacgtcttggagcgccagaggaggaacgagctaaaacggagcttttttgccctgcgtgaccagatcccggagttggaaaacaatgaaaaggcccccaaggtagttatccttaaaaaagccacagcatacatcctgtccgtccaagcagaggagcaaaagctcatttctgaagaggacttgttgcggaaacgacgagaacagttgaaacacaaacttgaacagctacggaactcttgtgcgtaaggaaaagtaaggaaaacgattccttctaacagaaatgtcctgagcaatcacctatgaacttgtttcaaatgcatgatcaaatgcaacctcacaaccttggctgagtcttgagactgaaagatttagccataatgtaaactgcctcaaattggactttgggcataaaagaacttttttatgcttaccatcttttttttttctttaacagatttgtatttaagaattgtttttaaaaaattttaa

SEQ ID NO: 618 - protein, 439 aa, Homo sapien
MPLNVSFTNRNYDLDYDSVQPYFYCDEEENFYQQQQQSELQPPAPSEDIWKKFELLPTPPLSPSRRSGLCSPSYVAVTPFSLRGDNDGGGGSFSTADQLEMVTELLGGDMVNQSFICDPDDETFIKNIIIQDCMWSGFSAAAKLVSEKLASYQAARKDSGSPNPARGHSVCSTSSLYLQDLSAAASECIDPSVVFPYPLNDSSSPKSCASQDSSAFSPSSDSLLSSTESSPQGSPEPLVLHEETPPTTSSDSEEEQEDEEEIDVVSVEKRQAPGKRSESGSPSAGGHSKPPHSPLVLKRCHVSTHQHNYAAPPSTRKDYPAAKRVKLDSVRVLRQISNNRKCTSPRSSDTEENVKRRTHNVLERQRRNELKRSFFALRDQIPELENNEKAPKVVILKKATAYILSVQAEEQKLISEEDLLRKRREQLKHKLEQLRNSCA

SEQ ID NO: 619 - DNA, 2182 bp, Homo sapien
  unsure 259-317: unknown base
gtggagccaagatttaaacccacaatcttagccactaatctggggacagtgcagactactgaatccttggatggaagacagactgagaccctatccagctgctgccccatctccaagagcctcgccctgctggaagtgcactgctagtctggttcatcagccactctgcacaggacccctgcccaggacccagggtctgcattttaggccatccttgctggataggcccagagcccagggtccccacctgcctgtagannnnnnnnnnnnnnnnnnnnnnnnnnnnnnnnnnnnnnnnnnnnnnnnnnnnnnnnnnngaatgatggggcatgatgaggaagaggcagaaaatgggaaggaagtataggatcaagatgggggcatcctaaggagggggcaactgccagccggtgccagcgtgccttccaatattcagccatctcctcatgaagcctgggatgtgattcttgtgcctctagctctttcctgaggggcactggtacctccaggacctggagtgtactggaagaaatggtgcagtccaggtacagcatggaccccagatcacccccaccccactccctttcagtgattattgtcttatgaactaggagggggagtggggcagagatgcctctttcatggctccctgcacacacagaacccctttgtactgggcacttctactcccaaggaccctgacttgcacccagcagctaaggtcatctcacccccacctcccacctgcccctgggccagcaggaggggcttggccatatgtaggcgagacaggacttcttgaagctgaaagatttcccaccccataaaagagccagaatgtgacaaccaggagcgctgatacctggggaagggagactggctctggtcgtgtgattccgggtttagggctctgggccattccccctcagccagctggtgacagagactggcccaccgcctgctgagagggccatctcacctacagtgagaacagagcccccaccccagcctggcttggacactctgaggatgggcccaagcagccacctaccaggactcttggcccggggccacacccagtgctgctagcagccccaccttctcctgaagtagccaggtgtgctctgcctccagggcctgcaatggccccccaacaccatctgctctccctgcagatgctgcagctgctccaagcaggcccctagttgctggtggctctggcccagctcttctgagtctcttgttcacctcagtgagtatcagcaactgctcctgcagacggactgtgtcctgagcctgggcaggggtctcagctgctggcatggagactctgggtcccgaagctcctgggccctgcctccatcccagctctgctcttggatctgcaggcctggcaccagcatctcctgtagatacacttggtccagaatcctggggtctccttccagcttccagaccacactggggtggtcttggcagaccgttgatgcctcagggcatgttgtggcagggtcctggccccaactcaagttatgactctgaacaagctctcctctgctctctggtctcagttttcccatctgaaccaggagggaagtcactgaatgatcccagggtattcccaaatgttggaagaggatccctctcttggctggactaagcccctgcgctgccttccttctctagataatgcttcaataatgaggaccagagaataaagtgtggggcagagtcaaaggtacagcagggccagtgcgcagggcctgccatgcacccacttgggggatccccaggctgggctctgggccaacaggctgttgggtcatttggtccaaatgccgctaggccttttccacttctgtctgcagcagcaggatcctgtgggtagaagggatggtctgcctgttccctgccaccccacccctcccccacagcccagccccactcacttgtcttctatgttctggtctggcctcctccactcagcctgtccctgggatccctgcatctggtgcctctcctgctccaggcaggccagggagcactccacctgctaggaggaggctgagtgggagggctgaaggcagcacagagcctcagataggtagggctagcttccctgcctcccaccaggcagggcagtgtctgcagcctttgataacgcaggcggactggcagccag

SEQ ID NO: 620 - protein, 95 aa, Homo sapien
MVCLFPATPPLPHSPAPLTCLLCSGLASSTQPVPGIPASGASPAPGRPGSTPPARRRLSGRAEGSTEPQIGRASFPASHQAGQCLQPLITQADWQ

SEQ ID NO: 621 - DNA, 3471 bp, Homo sapien
gtgagccgtctacgaagcccgggcttggcctgggcgacactgagcggctttaaccggcggcgtccagccggctccgccagcgctgccgccgccctcgaggctccctctgactgaaggcgcgctgagcatcgcggcattaggggctcctggtccctcaaacatccagggaagccattttcagggactaggtactgacccccgcgagccgccacagccacagcccgcgctccgggccgaacgcccgagctcaagagctcccgagcttccgtcgggcggcggcctcacagctgggggccctgaggcggaaggcgcagccgctcagctgcggaccgggggcgtggcgagggcgcacaggttctgtttttcgccggcccggggccgctttcggtttcgtttcccgccggcgtctccaccctgcgagagccgcccgccagccagcgtccgccgccgtccgcgtcgcgccacccgcggtccgacgggagcaggcccagcggccatggcccaggccggcgtcgtcggtgaggtcacccaggtgctgtgcgcggccgggggcgccctggagttgcccgagctgcggcgccgcttgcggatgggcttgagcgccgacgcgctggagcggctgctgcggcagcgtgggcgcttcgtggtggcggtgcgggcgggcggcgcagccgcggccccggagcgcgtggtgctggccgcctcgccgctgcgcctgtgtcgcgcgcaccagggctccaagccgggctgcgtggggctctgcgcgcagctccacctctgcaggttcatggtctacggcgcctgcaagttcctgagagccgggaagaactgtaggaatagtcacagcttgacaaccgaacacaacctgagtgtgctgagaactcatggcgttgaccacctgagctataatgagctatgccaactcttgtttcagaacgacccctggcttttgccagaaatttgccaacattacaacaaaggagatggaccccacggctcttgtgcctttcaaaagcagtgcatcaagctccatatctgccagtattttttacagggggaatgcaagtttggcactagctgtaagagatcccatgatttctctaattctgagaatctggaaaaattggagaagttgggtatgagctcagacctggtgagcaggctgcctaccatttatagaaatgcacatgacatcaagaataagagctctgcccccagcagagtgcctcctctttttgtcccacaggggacttctgaaagaaaagacagttcaggttctgtgtccccaaacactcttagccaggaggagggtgatcagatctgtttgtaccatatccggaaaagttgtagctttcaagataagtgccatagagttcatttccatttgccgtatcgatggcaattcttggatagaggcaaatgggaggatttggacaacatggaacttattgaagaggcatattgcaatcccaaaatagaaaggatcctgtgctctgagtcagccagtacctttcactctcattgtctgaactttaacgccatgacttacggtgctacccaggctcgccgcctctccacggcctcctctgtcaccaaacctccacacttcatcctcaccactgactggatttggtactggagtgatgagtttggttcttggcaggaatatggaagacagggcacggtgcaccctgtgaccactgtcagcagtagcgacgtggagaaggcctacctggcctactgtacaccggggtctgacggccaggcagccaccttgaagttccaggccggaaagcacaactacgagttagatttcaaagccttcgttcagaaaaacctggtctatggcacaactaaaaaggtttgccgcagacccaaatacgtgtctccccaggatgtgacgaccatgcaaacctgcaataccaagtttccaggcccgaagagcatcccagactattgggactcctctgccctgccagacccaggctttcagaagatcacccttagttcttcctcggaagagtatcagaaggtctggaacctctttaaccgcacgctgcctttttactttgttcagaagattgagcgagtacagaacctggccctctgggaagtctaccagtggcaaaaaggacagatgcagaagcagaacggagggaaggccgtggacgagcggcagctgttccacggcaccagcgccatttttgtggacgccatctgccagcagaactttgactggcgggtctgtggtgttcatggcacttcctacggcaaggggagctactttgcccgagatgctgcatattcccaccactacagcaaatccgacacgcagacccacacgatgttcctggcccgggtgctggtgggcgagttcgtcaggggcaatgcctcctttgtccgtccaccggccaaggagggctggagcaacgccttctatgatagctgcgtgaacagtgtgtccgacccctccatctttgtgatctttgagaaacaccaggtctacccagagtatgtcatccagtacaccacctcctccaagccctcggtcacaccctccatcctgctggccttgggctccctgttcagcagccgacagtgagtgcacaggagtgttccaggcctttcacctgctctgccttgaaatggctatttgggcctttccttttctttttaaacagaaacttttaatgaactgttctcttaacattgacctctcaatgaagttatgttcttaatctcttgctaataatgatttttacttttaagtcacttttgggttcactagtggactaaccagaagtgattgtagttgagtccagttttgctttttaataatgtgttgaagttttagtttttactctttgttgactttgctgcttattggcaccagggacagagtttctagatacaattttatggattggttttaatttttatgagtttgtctctgcagtgattcggtttctcagagtctcatggcatcatagtttttccagaatgacacagtagccaccggtggatgacagcccacgggcggcacagtcacttctgcctgttgctctgacaccaacccaggcagctctgctgtggcttctcctgggctctggcattagttggtctgtgtcacattgtcagaacaggtggctgctgtgtggtgccatcgagtccctgctggttccccttgtcctgggagggtcacccattgcccaaggaagtgcatccacctggcaggtgacctggaggagtagcttccccgaggacccccaggcttggcctgtgattgcgcaaacccacatttcctaagcacactggacacccttcgagtgtgggttttaacatccctgtgagattgaatacttgtgccacacatgtcacaaaagagtatggaaataaaagaaaatttatccgaaaaaaaaaaaaaaaaaaaaaaaaaaaaaaaaaaaaaaaaaaaaaaaaaaaaaaaaaaaa

SEQ ID NO: 622 - protein, 701 aa, Homo sapien
MAQAGVVGEVTQVLCAAGGALELPELRRRLRMGLSADALERLLRQRGRFVVAVRAGGAAAAPERVVLAASPLRLCRAHQGSKPGCVGLCAQLHLCRFMVYGACKFLRAGKNCRNSHSLTTEHNLSVLRTHGVDHLSYNELCQLLFQNDPWLLPEICQHYNKGDGPHGSCAFQKQCIKLHICQYFLQGECKFGTSCKRSHDFSNSENLEKLEKLGMSSDLVSRLPTIYRNAHDIKNKSSAPSRVPPLFVPQGTSERKDSSGSVSPNTLSQEEGDQICLYHIRKSCSFQDKCHRVHFHLPYRWQFLDRGKWEDLDNMELIEEAYCNPKIERILCSESASTFHSHCLNFNAMTYGATQARRLSTASSVTKPPHFILTTDWIWYWSDEFGSWQEYGRQGTVHPVTTVSSSDVEKAYLAYCTPGSDGQAATLKFQAGKHNYELDFKAFVQKNLVYGTTKKVCRRPKYVSPQDVTTMQTCNTKFPGPKSIPDYWDSSALPDPGFQKITLSSSSEEYQKVWNLFNRTLPFYFVQKIERVQNLALWEVYQWQKGQMQKQNGGKAVDERQLFHGTSAIFVDAICQQNFDWRVCGVHGTSYGKGSYFARDAAYSHHYSKSDTQTHTMFLARVLVGEFVRGNASFVRPPAKEGWSNAFYDSCVNSVSDPSIFVIFEKHQVYPEYVIQYTTSSKPSVTPSILLALGSLFSSRQ

SEQ ID NO: 623 - DNA, 690 bp, Homo sapien
tcccttattcaatcaaaggtaatgtatattacttccaaagtataggagtattaatttaagctgaccaaaaaaagaggacccagatactcgtttccaaagatgttttgaatccacctatttctcaaaaggccaaatttcattttacagctcttgtgaaaccaggcaagcagtgtaaattttaaaatgcagcagtgggatatcttcaaatgtagcagtgagatttttaaaatgtagttgtttcaaaactgatcagtgaccgtctaaaatacgggctccttgaggacatcctgcgcctggttcatcctttttgcactctcaaagtctagccttcccagatgggacctcagtcccagcccccctacactgccatcccccagatctttagggcagtggggttcattgaacaaggttgcaggctacaaacttggcaaagtttatactaacacctcattccatcccacctcccatcttaaaaaggaaaccgttaagtatcttattctagtgacttcaataaaggaactaatttataagacagccaagaacaattaaagtcataaagggccaaacattttattttcatctaagaaccgtttgcaggggtggtccgatcttttggcttccctgggccacactagaactgtcttgggccacacgtaaaatacattaactagctgatgagcttttttttcc

SEQ ID NO: 624 - protein, 35 aa, Homo sapien [sequence omitted]

SEQ ID NO: 625 - DNA, 3625 bp, Homo sapien
ggccaccggagcggcccggcgacgatcgctgacagcttcccctgcccttcccgtcggtcgggccgccagccgccgcagccctcggcctgcacgcagccaccggccccgctcccggagcccagcgccgccgaggccgcagccgcccggccagtaaggcggcgccgcccgcggccaccgcgggccctgccgttccctccgccgcgctgcgccatggcgcggcgctgactggcctggcccggccccgccgcgctcccgctcgccccgacccgcactcgggcccgcccgggctccggcctgccgccgcctcttccttctccagccggcaggccccgccgcttaggagggagagcccacccgcgccaggaggccgaacgcggactcgccacccggcttcagaatggcagaagatgatccatatttgggaaggcctgaacaaatgtttcatttggatccttctttgactcatacaatatttaatccagaagtatttcaaccacagatggcactgccaacagatggcccataccttcaaatattagagcaacctaaacagagaggatttcgtttccgttatgtatgtgaaggcccatcccatggtggactacctggtgcctctagtgaaaagaacaagaagtcttaccctcaggtcaaaatctgcaactatgtgggaccagcaaaggttattgttcagttggtcacaaatggaaaaaatatccacctgcatgcccacagcctggtgggaaaacactgtgaggatgggatctgcactgtaactgctggacccaaggacatggtggtcggcttcgcaaacctgggtatacttcatgtgacaaagaaaaaagtatttgaaacactggaagcacgaatgacagaggcgtgtataaggggctataatcctggactcttggtgcaccctgaccttgcctatttgcaagcagaaggtggaggggaccggcagctgggagatcgggaaaaagagctaatccgccaagcagctctgcagcagaccaaggagatggacctcagcgtggtgcggctcatgtttacagcttttcttccggatagcactggcagcttcacaaggcgcctggaacccgtggtatcagacgccatctatgacagtaaagcccccaatgcatccaacttgaaaattgtaagaatggacaggacagctggatgtgtgactggaggggaggaaatttatcttctttgtgacaaagttcagaaagatgacatccagattcgattttatgaagaggaagaaaatggtggagtctgggaaggatttggagatttttcccccacagatgttcatagacaatttgccattgtcttcaaaactccaaagtataaagatattaatattacaaaaccagcctctgtgtttgtccagcttcggaggaaatctgacttggaaactagtgaaccaaaacctttcctctactatcctgaaatcaaagataaagaagaagtgcagaggaaacgtcagaagctcatgcccaatttttcggatagtttcggcggtggtagtggtgccggagctggaggcggaggcatgtttggtagtggcggtggaggagggggcactggaagtacaggtccagggtatagcttcccacactatggatttcctacttatggtgggattactttccatcctggaactactaaatctaatgctgggatgaagcatggaaccatggacactgaatctaaaaaggaccctgaaggttgtgacaaaagtgatgacaaaaacactgtaaacctctttgggaaagttattgaaaccacagagcaagatcaggagcccagcgaggccaccgttgggaatggtgaggtcactctaacgtatgcaacaggaacaaaagaagagagtgctggagttcaggataacctctttctagagaaggctatgcagcttgcaaagaggcatgccaatgcccttttcgactacgcggtgacaggagacgtgaagatgctgctggccgtccagcgccatctcactgctgtgcaggatgagaatggggacagtgtcttacacttagcaatcatccaccttcattctcaacttgtgagggatctactagaagtcacatctggtttgatttctgatgacattatcaacatgagaaatgatctgtaccagacgcccttgcacttggcagtgatcactaagcaggaagatgtggtggaggatttgctgagggctggggccgacctgagccttctggaccgcttgggtaactctgttttgcacctagctgccaaagaaggacatgataaagttctcagtatcttactcaagcacaaaaaggcagcactacttcttgaccaccccaacggggacggtctgaatgccattcatctagccatgatgagcaatagcctgccatgtttgctgctgctggtggccgctggggctgacgtcaatgctcaggagcagaagtccgggcgcacagcactgcacctggctgtggagcacgacaacatctcattggcaggctgcctgctcctggagggtgatgcccatgtggacagtactacctacgatggaaccacacccctgcatatagcagctgggagagggtccaccaggctggcagctcttctcaaagcagcaggagcagatcccctggtggagaactttgagcctctctatgacctggatgactcttgggaaaatgcaggagaggatgaaggagttgtgcctggaaccacgcctctagatatggccaccagctggcaggtatttgacatattaaatgggaaaccatatgagccagagtttacatctgatgatttactagcacaaggagacatgaaacagctggctgaagatgtgaagctgcagctgtataagttactagaaattcctgatccagacaaaaactgggctactctggcgcagaaattaggtctggggatacttaataatgccttccggctgagtcctgctccttccaaaacacttatggacaactatgaggtctctgggggtacagtcagagagctggtggaggccctgagacaaatgggctacaccgaagcaattgaagtgatccaggcagcctccagcccagtgaagaccacctctcaggcccactcgctgcctctctcgcctgcctccacaaggcagcaaatagacgagctccgagacagtgacagtgtctgcgacacgggcgtggagacatccttccgcaaactcagctttaccgagtctctgaccagtggtgcctcactgctaactctcaacaaaatgccccatgattatgggcaggaaggacctctagaaggcaaaatttagcctgctgacaatttcccacaccgtgtaaaccaaagccctaaaattccactgcgttgtccacaagacagaagctgaagtgcatccaaaggtgctcagagagccggcccgcctgaatcattctcgatttaactcgagaccttttcaacttggcttcctttcttggttcataaatgaattttagtttggttcacttacagatagtatctagcaatcacaacactggctgagcggatgcatctggggatgaggttgcttactaagctttgccagctgctgctggatcacagctgctttctgttgtcattgctgttgtccctctgc

SEQ ID NO: 626 - protein, 968 aa, Homo sapien
MAEDDPYLGRPEQMFHLDPSLTHTIFNPEVFQPQMALPTDGPYLQILEQPKQRGFRFRYVCEGPSHGGLPGASSEKNKKSYPQVKICNYVGPAKVIVQLVTNGKNIHLHAHSLVGKHCEDGICTVTAGPKDMVVGFANLGILHVTKKKVFETLEARMTEACIRGYNPGLLVHPDLAYLQAEGGGDRQLGDREKELIRQAALQQTKEMDLSVVRLMFTAFLPDSTGSFTRRLEPVVSDAIYDSKAPNASNLKIVRMDRTAGCVTGGEEIYLLCDKVQKDDIQIRFYEEEENGGVWEGFGDFSPTDVHRQFAIVFKTPKYKDINITKPASVFVQLRRKSDLETSEPKPFLYYPEIKDKEEVQRKRQKLMPNFSDSFGGGSGAGAGGGGMFGSGGGGGGTGSTGPGYSFPHYGFPTYGGITFHPGTTKSNAGMKHGTMDTESKKDPEGCDKSDDKNTVNLFGKVIETTEQDQEPSEATVGNGEVTLTYATGTKEESAGVQDNLFLEKAMQLAKRHANALFDYAVTGDVKMLLAVQRHLTAVQDENGDSVLHLAIIHLHSQLVRDLLEVTSGLISDDIINMRNDLYQTPLHLAVITKQEDVVEDLLRAGADLSLLDRLGNSVLHLAAKEGHDKVLSILLKHKKAALLLDHPNGDGLNAIHLAMMSNSLPCLLLLVAAGADVNAQEQKSGRTALHLAVEHDNISLAGCLLLEGDAHVDSTTYDGTTPLHIAAGRGSTRLAALLKAAGADPLVENFEPLYDLDDSWENAGEDEGVVPGTTPLDMATSWQVFDILNGKPYEPEFTSDDLLAQGDMKQLAEDVKLQLYKLLEIPDPDKNWATLAQKLGLGILNNAFRLSPAPSKTLMDNYEVSGGTVRELVEALRQMGYTEAIEVIQAASSPVKTTSQAHSLPLSPASTRQQIDELRDSDSVCDTGVETSFRKLSFTESLTSGASLLTLNKMPHDYGQEGPLEGKI

SEQ ID NO: 627 - DNA, 2356 bp, Homo sapien
agcaaagtattcctgtgttgctggaaggcagagatgctctcgtgagatcccagacgggctcaggtaaaactcttgcctattgcatccctgtggtccagtcccttcaagcaatggagtcaaaaatacagcgcagtgatggcccctatgccctggtgctcgtgccaacgagagagctagctctacaaagctttgacactgtccagaaactgcttaagcctttcacctggattgtgcctggagtgttaatgggaggagagaagagaaaatcagaaaaggccagactccgcaaaggaataaatatccttatctcaactcctggacgcctggtggatcatataaaatccacaaagaacattcattttagtcggctgcggtggttggtgtttgatgaagcagacagaatcttggatttgggttttgaaaaggacatcacagtgatacttaatgctgtaaatgctgaatgccaaaaacgacagaatgtcttgctatcagcgacactcacagaaggtgtaacgcggctagctgatatcagtttgcatgatccagtcagtatttctgtcctggacaagagccatgaccagttgaacccaaaggacaaagcggtccaggaggtctgtcctccaccagctggcgacaagctggacagctttgcaataccagagagtctcaagcagcatgtgactgtggttcccagcaaactgaggctcgtctgcctagcggccttcatccttcagaaatgcaagtttgaggaagaccagaagatggttgtctttttctcaagttgcgagctggtggagttccactacagcctcttcctacagaccctgctgagcagctcaggggcgccggcatcagggcagttgccatctgcctccatgcgattaaaattcctacggctgcatggcggcatggagcaggaggaaagaacagcagtgtttcaggaattttcacattccagaagaggcgtccttctttgcacggatgttgcagctcggggcttagatctccctcaagtcacgtggattgttcagtacaacgctccatcttcacctgcagaatacatccaccggattggaagaaccgcccggattggctgccatgggagcagcctgctcattttggctccttcggaggcagaatatgtcaactcgttggcttctcacaaaatcaacgtttctgagattaagatggaagatattttgtgtgttctgacaagagatgattgttttaaagggaaacgatggggagcccagaaatcccatgctgttggcccccaggaaatccgagagcgagccacagtcttgcagacggtatttgaagattacgtgcactccagtgagaggagggtctcctgggcaaagaaagctctgcagtccttcatccaagcctacgccacctaccccagggagctgaagcacatcttccacgtccgatccctccaccttgggcatgtggcgaagagcttcggactaagagatgcccccaggaatcttagtgccttgactagaaagaagaggaaagcacacgtgaaaaggcctgaccttcataagaagacccagagtaaacacagcctcgctgaaatcctacgttcggaatactcaagcggcatggaggccgacatcgccaaggtcaaaaagcaaaacgcacctggagagcctggtggccggcccctgcagcacagtctgcagccgacaccctgctttggccgtgggaaaacattaaaatggagaaaaacccaaaaaggtgtacagcgggacagcaagacttcccagaaagtttaaaatctctctgggtcttcgagtggaacctggaagccccgggtggcagtggattgatgtccagttcttgtcagaggaggcttgtgaaaaataactgcgcctttgcctgaataccacgtccccaagaatcagaggggccacagcccttctcctccatgggaggccctggagcctgatagaaatcagtggtgtggggcactgtagagactagccagctcccgacggaaggggtctgtgtcttgtattgatcccatcagtgcccggcactcccttcacccaggtgctgacgtgccggggttgagctggcaccccgggatgtgatgtaagaacgccctgcgcgtcagcctggaacgggcttgattgctgcccttaactgtgttctgaagtttcacagcttggcttcagcctatcagcgcatacattggcatgaattttgtgaattagggtgttaaaaactggaattgaatttgtacaaaaagagaatatatttatcactaattattttcttaatgtaggaatgtaccgttaaaaaggaccaaaagtttttggtctgggtcaaaaaatacgaatgtgttctc

SEQ ID NO: 628 - protein, 556 aa, Homo sapien
MESKIQRSDGPYALVLVPTRELALQSFDTVQKLLKPFTWIVPGVLMGGEKRKSEKARLRKGINILISTPGRLVDHIKSTKNIHFSRLRWLVFDEADRILDLGFEKDITVILNAVNAECQKRQNVLLSATLTEGVTRLADISLHDPVSISVLDKSHDQLNPKDKAVQEVCPPPAGDKLDSFAIPESLKQHVTVVPSKLRLVCLAAFILQKCKFEEDQKMVVFFSSCELVEFHYSLFLQTLLSSSGAPASGQLPSASMRLKFLRLHGGMEQEERTAVFQEFSHSRRGVLLCTDVAARGLDLPQVTWIVQYNAPSSPAEYIHRIGRTARIGCHGSSLLILAPSEAEYVNSLASHKINVSEIKMEDILCVLTRDDCFKGKRWGAQKSHAVGPQEIRERATVLQTVFEDYVHSSERRVSWAKKALQSFIQAYATYPRELKHIFHVRSLHLGHVAKSFGLRDAPRNLSALTRKKRKAHVKRPDLHKKTQSKHSLAEILRSEYSSGMEADIAKVKKQNAPGEPGGRPLQHSLQPTPCFGRGKTLKWRKTQKGVQRDSKTSQKV

SEQ ID NO: 629 - DNA, 1325 bp, Homo sapien
agcatctacaaaggaggaatagtcaaagcagcagcggcggcggcggcggcggcagcagcagcagcagcaggagaccttctctgatggatgacctctgtgaagcaaatggcacttttgccatcagcttatttaaaatattgggggaagaggacaactcaagaaacgtattcttctctcccatgagcatctcctctgccctggccatggtcttcatgggggcaaagggaagcactgcagcccagatgtcccaggcactttgtttatacaaagacggagatattcaccgaggtttccagtcacttctcagtgaagttaacagaactggcactcagtacttgcttagaactgccaacagactctttggagaaaagacgtgtgatttccttccagactttaaagaatactgtcagaagttctatcaggcagagctggaggagttgtcctttgctgaagacactgaagagtgcaggaagcatataaatgactgggtggcagagaagactgaaggtaagatttcagaggtactggatgctgggacagtcgatcccctgacaaagctagtccttgtgaatgccatttatttcaagggaaagtggaatgagcaatttgacagaaagtacacaaggggaatgctctttaaaaccaacgaggaaaaaaagacagtgcagatgatgtttaaggaagctaagtttaaaatggggtatgcggatgaggtacacacccaggtcctggagctgccctatgtggaagaggagctgagcatggtcattctgcttcccgatgacaacacggacctcgccgtggtggaaaaagcacttacatatgagaaattcaaagcctggacaaattcagaaaagttgacaaaaagtaaggttcaagttttccttcccagattaaagctggaggagagttatgacttggagcctttccttcgaagattaggaatgatcgatgcttttgacgaagccaaggcagacttttctggaatgtcaactgagaagaatgtgcctctgtccaaggttgcccacaagtgcttcgtggaggtcaatgaggaaggcacagaggctgccgcagccactgctgtggtcaggaattcccggtgcagcagaatggagccaagattctgtgcagaccacccttttcttttcttcatcaggcgccacaaaaccaactgcatcttgttctgtggcaggttctcttctccgtaaagaggagcaattgctgtacataccctcctttccttctacctatcttgccttaattaacattccctgtgacctagttggtgcagtggcttgaatgccaaaataaagcgtgtgcactgg

SEQ ID NO: 630 - protein, 374 aa, Homo sapien
MDDLCEANGTFAISLFKILGEEDNSRNVFFSPMSISSALAMVFMGAKGSTAAQMSQALCLYKDGDIHRGFQSLLSEVNRTGTQYLLRTANRLFGEKTCDFLPDFKEYCQKFYQAELEELSFAEDTEECRKHINDWVAEKTEGKISEVLDAGTVDPLTKLVLVNAIYFKGKWNEQFDRKYTRGMLFKTNEEKKTVQMMFKEAKFKMGYADEVHTQVLELPYVEEELSMVILLPDDNTDLAVVEKALTYEKFKAWTNSEKLTKSKVQVFLPRLKLEESYDLEPFLRRLGMIDAFDEAKADFSGMSTEKNVPLSKVAHKCFVEVNEEGTEAAAATAVVRNSRCSRMEPRFCADHPFLFFIRRHKTNCILFCGRFSSP

SEQ ID NO: 631 - DNA, 1243 bp, Homo sapien
aaatcagttttctccacctgcaccactgcatagcacagatacagaaaccatcctatttcaggatttgaatgcaaaacttaccttcttactctaaagatgaatgatcagggagagatttattcaaccctgagatttttgcagtctccttcagagtcacagaatagattaaggcctgatgatactcaaaggcctgggaaaactgatgacaaagaattttcagtgccctggcacctcattgcagtgactcttgggatcctctgtttacttcttctgatgatagtcacagtgttggtgacaaatatctttcagtgtattcaagaaaaacatcaacggcaggaaattctaagaaactgtagtgaaaagtacatcatgcaaaatgacaactacttaaaagagcagattttgacaaataagactttaaaatatgacgttctcaaaaatagctttcagcagaaaaaggaactggattcacgccttatacaaaagaacagatgtcatagagaaaatgagatcgtttttaaagttttgcaaaatacaggcaaattctctgaagaccacgggtcctgttgtggagtaaactgttattattttaccatgcagaagaaagactggaagggatgtaaacagacttgtcaacattgtagatcatcccttttgaagatagatgacaaagatgaactcgtattttacattcacttttattctcttggactctgtttctcaatgttggacctaagatattgaagacaggctggagtccagagccttcattcaatctcagatttatgaaaataattactggatcggattatcatatgatgaaagggaaagtaagtggaaatggattgataatggcacatctcctggaattaattctacaataatgcgtttttcttctgggagaggagaatgtgcatttttgacctcaacaagaatggcaactattgattgcattcaaacgtacaattgtatctgtgggaagagaatagactctattttctctgattcggtgtgcgccaagaagaaaaggtgaaaatggaatgttttctttttttgtttcccataataatttctgattataaatcattgcttttaactgtgggacttagttaattcttcaaaagataaagatgaacaggaagaaaaagaaaattattttggactatgactttaaagatcagatgccatctttcttcctggagaagaggagattttctcttttgagagtggttgttccttcctt

SEQ ID NO: 632 - protein, 215 aa, Homo sapien
MNDQGEIYSTLRFLQSPSESQNRLRPDDTQRPGKTDDKEFSVPWHLIAVTLGILCLLLLMIVTVLVTNIFQCIQEKHQRQEILRNCSEKYIMQNDNYLKEQILTNKTLKYDVLKNSFQQKKELDSRLIQKNRCHRENEIVFKVLQNTGKFSEDHGSCCGVNCYYFTMQKKDWKGCKQTCQHCRSSLLKIDDKDELVFYIHFYSLGLCFSMLDLRY

SEQ ID NO: 633 - DNA, 1983 bp, Homo sapien
cgagtaaagtttgcaaagaggcgcgggaggcggcagccgcagcgaggaggcggcggggaagaagcgcagtctccgggttgggggcgggggcggggggggcgccaaggagccgggtggggggcggcggccagcatgcggccccgcagcgccctgccccgcctgctgctgccgctgctgctgctgcccgccgccgggccggcccagttccacggggagaagggcatctccatcccggaccacggcttctgccagcccatctccatcccgctgtgcacggacatcgcctacaaccagaccatcatgcccaaccttctgggccacacgaaccaggaggacgcaggcctagaggtgcaccagttctatccgctggtgaaggtgcagtgctcgcccgaactgcgcttcttcctgtgctccatgtacgcacccgtgtgcaccgtgctggaacaggccatcccgccgtgccgctctatctgtgagcgcgcgcgccagggctgcgaagccctcatgaacaagttcggttttcagtggcccgagcgcctgcgctgcgagcacttcccgcgccacggcgccgagcagatctgcgtcggccagaaccactccgaggacggagctcccgcgctactcaccaccgcgccgccgccgggactgcagccgggtgccgggggcaccccgggtggcccgggcggcggcggcgctcccccgcgctacgccacgctggagcaccccttccactgcccgcgcgtcctcaaggtgccatcctatctcagctacaagtttctgggcgagcgtgattgtgctgcgccctgcgaacctgcgcggcccgatggttccatgttcttctcacaggaggagacgcgtttcgcgcgcctctggatcctcacctggtcggtgctgtgctgcgcttccaccttcttcactgtcaccacgtacttggtagacatgcagcgcttccgctacccagagcggcctatcatttttctgtcgggctgctacaccatggtgtcggtggcctacatcgcgggcttcgtgctccaggagcgcgtggtgtgcaacgagcgcttctccgaggacggttaccgcacggtggtgcagggcaccaagaaggagggctgcaccatcctcttcatgatgctctacttcttcagcatggccagctccatctggtgggtcatcctgtcgctcacctggttcctggcagccggcatgaagtggggccacgaggccatcgaggccaactctcagtacttccacctggccgcctgggccgtgccggccgtcaagaccatcaccatcctggccatgggccagatcgacggcgacctgctgagcggcgtgtgcttcgtaggcctcaacagcctggacccgctgcggggcttcgtgctagcgccgctcttcgtgtacctgttcatcggcacgtccttcctcctggccggcttcgtgtcgctcttccgcatccgcaccatcatgaagcacgacggcaccaagaccgaaaagctggagcggctcatggtgcgcatcggcgtcttctccgtgctctacacagtgcccgccaccatcgtcatcgcttgctacttctacgagcaggccttccgcgagcactgggagcgctcgtgggtgagccagcactgcaagagcctggccatcccgtgcccggcgcactacacgccgcgcatgtcgcccgacttcacggtctacatgatcaaatacctcatgacgctcatcgtgggcatcacgtcgggcttctggatctggtcgggcaagacgctgcactcgtggaggaagttctacactcgcctcaccaacagccgacacggtgagaccaccgtgtgagggacgcccccaggccggaaccgcgcggcgctttcctccgcccggggtggggcccctacagactccgtattttatttttttaaataaaaaacgatcgaaaccatttcacttttaggttgctttttaaaagagaactctctgcccaacaccccc

SEQ ID NO: 634 - protein, 565 aa, Homo sapien
MRPRSALPRLLLPLLLLPAAGPAQFHGEKGISIPDHGFCQPISIPLCTDIAYNQTIMPNLLGHTNQEDAGLEVHQFYPLVKVQCSPELRFFLCSMYAPVCTVLEQAIPPCRSICERARQGCEALMNKFGFQWPERLRCEHFPRHGAEQICVGQNHSEDGAPALLTTAPPPGLQPGAGGTPGGPGGGGAPPRYATLEHPFHCPRVLKVPSYLSYKFLGERDCAAPCEPARPDGSMFFSQEETRFARLWILTWSVLCCASTFFTVTTYLVDMQRFRYPERPIIFLSGCYTMVSVAYIAGFVLQERVVCNERFSEDGYRTVVQGTKKEGCTILFMMLYFFSMASSIWWVILSLTWFLAAGMKWGHEAIEANSQYFHLAAWAVPAVKTITILAMGQIDGDLLSGVCFVGLNSLDPLRGFVLAPLFVYLFIGTSFLLAGFVSLFRIRTIMKHDGTKTEKLERLMVRIGVFSVLYTVPATIVIACYFYEQAFREHWERSWVSQHCKSLAIPCPAHYTPRMSPDFTVYMIKYLMTLIVGITSGFWIWSGKTLHSWRKFYTRLTNSRHGETTV

SEQ ID NO: 635 - DNA, 1675 bp, Homo sapien
cgggcgcggggcttttgctgaccgccgtgtcccccaggccggcgcgaccgtgcccctggaggtggtgctgctgcgcaaggtgggcgcggcgggcggcgcgcgcggcgtcatccgcctgctggactggttcgagcggcccgacggcttcctgctggtgctggagcggcccgagccggcgcaggacctcttcgactttatcacggagcgcggcgccctggacgagccgctggcgcgccgcttcttcgcgcaggtgctggccgccgtgcgccactgccacagctgcggggtcgtgcaccgcgacattaaggacgaaaatctgcttgtggacctgcgctccggagagctcaagctcatcgacttcggttcgggtgcgctgctcaaggacacggtctacaccgacttcgacggcacccgagtgtacagccccccggagtggatccgctaccaccgctaccacgggcgctcggccaccgtgtggtcgctgggcgtgcttctctacgatatggtgtgtggggacatccccttcgagcaggacgaggagatcctccgaggccgcctgctcttccggaggagggtctctccagagcggccgtcgctggatcagattgcggcccatccctggatgctgggggctgacgggggcgtcccggagagctgtgacctgcggctgtgcaccctcgaccctgatgacgtggccagcaccacgtccagcagcgagagcttgtgaggagctgcacctgactgggagctaggggaccacctgccttggccagacctgggacgcccccagaccctgactttctcctgcgtgggccgtctcctcctgcggaagcagtgacctctgacccctggtgaccttcgctttgagtgccttttgaacgctggtcccgcgggacttggttttctcaagctctgtctgtccaaagacgctccggtcgaggtcccgcctgccctgggtggatacttgaaccccagacgcccctctgtgctgctgtgtccggaggcggccttcccatctgcctgcccacccggagctctttacgccggcgcagggtcccaagcccacctcccgccctcagtcctgcggtgtgcgtctgggcacgtcctgcacacacaatgcaagtcctggcctccgcgcccgcccgcccacgcgagccgtacccgccgccaactctgttatttatggtgtgacccctggaggtgccctcggcccaccggggctatttattgtttaatttatttgttgaggttatttcctctgagcagtctgcctctcccaagccccaggggacagtggggaggcaggggagggggtggctgtggtccagggaccccaggccctgattcctgtgcctggcgtctgtcccggccccgcctgtcagaagatgaacatgtatagtggctaacttaaggggagtgggtgaccctgacacttccaggcactgtgcccagggtttgggttttaaattattgactttgtacagtctgcttgtgggctctgaaagctggggtggggccagagcctgagcgtttaatttattcagtacctgtgtttgtgtgaatgcggtgtgtgcaggcatcgcagatgggggttctttcagttcaaaagtgagatgtctggagatcatatttttttatacaggtatttcaattaaaatgtttttgtacatagtgg

SEQ ID NO: 636 - protein, 249 aa, Homo sapien [sequence omitted]

SEQ ID NO: 637 - DNA, 2196 bp, Homo sapien
atgctagacaaggtactatgcctgtatctctgctgaaggctcatgaagctgaaatgtgggaagttcactttcacccatccaacccagaacatctttttacctgctctgaagatggatccctctggcactgggatgcttccacagatgtacctgaaaagtcgtcactctttcaccaaggaggaagaagcagtacttttttgtctcatagcattagtaaccaagctaatgttcaccagtctgtcattagctcctggctcagcactgatcctgcaaaagaccgaattgaaatcacaagcttacttcccagtaggtctctgtctgtgaacactttggatgttttaggtccttgtcttgtttgtggaaccgatgcagaagcaatttatgttactagacatcttttttcgtagaagtactataattataagatttcagatagaacatgcaattagccttttgaaatccagcttctgtgcaaaattttagtatcagaaaatacgagatttgcaggggaaacatcagtaaactaccattaatgtcaatgcccagttttgacttttgttagcctgacactcccaaacagttgtagaatccgatagatgactgatggcaaaagattgtgaacatgtggaagaaaatcagtgggattctggtgctgatgaataggttgccttcagagtattattgacagacagcttgtggaactaattctttatttttgatgttgtgggaattaacacatcaatggtggttatgggaactaccaatgggttcctacaatttttatcagtagtatgtggcatatacaccttcctagtggcagttgccaatgttaatgattattctttttattgcaagtatttcctatgatccttccacactttatttccttaataataataaactttttcagaaagaattgagtagagcaaaaatgacaaagatgtgtagctgtgttcaattttttttttttttttttttgaggcagagtcttgctctgctggagtgcggtggtgcaatctcggctcactgcaacctccacctcccaggttcaagcaattctcctgcctcagtctcctgagtagctggaactacaggtgtgcgccaccacgcccagctaatttttgtaattttagtagagacagagtttcaccatgttggccaggatggtctcgatctcttgacctcatgatccacccgcctcgacctcccaaagtgctgtgattacaggtgtgagccactgcacccggcctgaaatttttttaaggtgaaaatgttttgacaagttcctttttcagaataggtttttgagcagaactctttcagcttgttagacccaactttgcttttgtttagcttcacagcatagctgaaagttgccaaactggacattgtgcaataaagtagaattctatattgataagcaaactatttccaaactaaaaatgtgatagataaaagtgtgattaatcaaatgatatgatcagagtaaagaattttgccattttgatccttttactttgttttagccacctatagtgttaccaaccatctttatccttgtctgcagggataataatgaactaatgtagtgttttaagataatttaatgatactatctttccaaactttgttagattttaaatgtattattgacctgagaccttaatgacaaatcactgctattagacaattgaagtgttcatttactttgtaattccaataatcatagttatggaattatggtaaggttttgcttttctgtcctaataaatatatatattttttgagatggagttttgctcttgttgctgaggcaggagagttgctcgagcccgggaggcagaggttgcagtgacccaggatcgtgccacttcactccagcctgggcaaaagagcaaaacgccatctcaaaaaatatacatatataaggagataaagtttcccattttccaatacagtttcacatttgaacagccctaattgatacaactttatggcagggttttagtgtgtgagtgggatccaaaacactcaatcctgtaaaagggtacagtcctattgtatgttagttaacacactgatgatgtgagcctgtgagatgagccaatcaccagttgttatgttcgaatctgctttgtgttgggacgctttaatgtagggtttcactaaataaatgaattttcatatactgaactg

SEQ ID NO: 638 - protein, 129 aa, Homo sapien
MPVSLLKAHEAEMWEVHFHPSNPEHLFTCSEDGSLWHWDASTDVPEKSSLFHQGGRSSTFLSHSISNQANVHQSVISSWLSTDPAKDRIEITSLLPSRSLSVNTLDVLGPCLVCGTDAEAIYVTRHLFS

SEQ ID NO: 639 - DNA, 3443 bp, Homo sapien
gtgctttactgcgcgctctggtactgctgtggctccccgtcctggtgcgggacctgtgccccgcgcttcagccctccccgcacagcctactgattcccctgccgcccttgctcacctcctgctcgccatggagtcgctggttttcgcgcggcgctccggccccactccctcggccgcagagctagcccggccgctggcggaagggctgatcaagtcgcccaagcccctaatgaagaagcaggcggtgaagcggcaccaccacaagcacaacctgcggcaccgctacgagttcctggagaccctgggcaaaggcacctacgggaaggtgaagaaggcgcgggagagctcggggcgcctggtggccatcaagtcaatccggaaggacaaaatcaaagatgagcaagatctgatgcacatacggagggagattgagatcatgtcatcactcaaccaccctcacatcattgccatccatgaagtgtttgagaacagcagcaagatcgtgatcgtcatggagtatgccagccggggcgacctttatgactacatcagcgagcggcagcagctcagtgagcgcgaagctaggcatttcttccggcagatcgtctctgccgtgcactattgccatcagaacagagttgtccaccgagatctcaagctggagaacatcctcttggatgccaatgggaatatcaagattgctgacttcggcctctccaacctctaccatcaaggcaagttcctgcagacattctgtgggagccccctctatgcctcgccagagattgtcaatgggaagccctacacaggcccagaggtggacagctggtccctgggtgttctcctctacatcctggtgcatggcaccatgccctttgatgggcatgaccataagatcctagtgaaacagatcagcaacggggcctaccgggagccacctaaaccctctgatgcctgtggcctgatccggtggctgttgatggtgaaccccacccgccgggccaccctggaggatgtggccagtcactggtgggtcaactggggctacgccacccgagtgggagagcaggaggctccgcatgagggtgggcaccctggcagtgactctgcccgcgcctccatggctgactggctccggcgttcctcccgccccctcctggagaatggggccaaggtgtgcagcttcttcaagcagcatgcacctggtgggggaagcaccacccctggcctggagcgccagcattcgctcaagaagtcccgcaaggagaatgacatggcccagtctctccacagtgacacggctgatgacactgcccatcgccctggcaagagcaacctcaagctgccaaagggcattctcaagaagaaggtgtcagcctctgcagaaggggtacaggaggaccctccggagctcagcccaatccctgcgagcccagggcaggctgccccgctgctccccaagaagggcattctcaagaagccccgacagcgcgagtctggctactactcctctcccgagcccagtgaatctggggagctcttggacgcaggcgacgtgtttgtgagtggggatcccaaggagcagaagcctccgcaagcttcagggctgctcctccatcgcaaaggcatcctcaaactcaatggcaagttctcccagacagccttggagctcgcggcccccaccaccttcggctccctggatgaactcgccccacctcgccccctggcccgggccagccgaccctcaggggctgtgagcgaggacagcatcctgtcctctgagtcctttgaccagctggacttgcctgaacggctcccagagcccccactgcggggctgtgtgtctgtggacaacctcacggggcttgaggagcccccctcagagggccctggaagctgcctgaggcgctggcggcaggatcctttgggggacagctgcttttccctgacagactgccaggaggtgacagcgacctaccgacaggcactgagggtctgctcaaagctcacctgagtggagtaggcattgccccagcccggtcaggctctcagatgcagctggttgcaccccgaggggagatgccttctcccccacctcccaggacctgcatcccagctcagaaggctgagagggtttgcagtggagccctgagcagggctggatatgggaagtaggcaaatgaaatgcgccaagggttcagtgtctgtcttcagccctgctgaacgaagaggatactaaagagaggggaacgggaatgcccgcgacagagtccacattgcctgtttcttgtgtacatgggggggccacagagacctggaaagagaactctcccagggcccatctcctgcatcccatgaatactctgtacacatggtgccttctaaggacagctccttccctactcattccctgcccaagtggggccagacctctttacacacacattcccgttcctaccaaccaccagaactggatggtggcacccctaatgtgcatgaggcatcctgggaatggtctggagtaacgcttcgttatttttatttttatttttatttatttatttatttttttgagacggagtttcgctcttggtgcccaggctagagtgcaatggcgcgatctcagctcacctcaacctccgcctcccgggttcaagcgattctcctgcctcagcctccctagtagctgggattacaggcgcccgccaccatgcccggctaattttgtatttttagtagagacagggtttctccatgttggtcaggctggtctcaaactcccgacctcaggtgatccacccacctcggcctcccaaagtgctgggattacaggcgtgagccaccgcgccccacctaacccttccttatttagcctaggagtaagagaacacaatctctgtttcttcaatggttctcttcccttttccatcctccaaacctggcctgagcctcctgaagttgctgctgtgaatctgaaagacttgaaaagcctccgcctgctgtgtggacttcatctcaaggggcccagcctcctctggactccaccttggacctcagtgactcagaacttctgcctctaagctgctctaaagtccagactatggatgtgttctctaggccttcaggactctagaatgtccatatttatttttatgttcttggctttgtgttttaggaaaagtgaatcttgctgttttcaataatgtgaatgctatgttctgggaaaatccactatgacatctaagttttgtgtacagagagatatttttgcaactatttccacctcctcccacaaccccccacactccactccacactcttgagtctctttacctaatggtctctacctaatggacctccgtggccaaaaagtaccattaaaaccagaaaggtgattggaaaaaaaaaaaaaaaaaaaaaaaaaaaaaaaaaaaaaaaaaaaa

SEQ ID NO: 640 - protein, 628 aa, Homo sapien
MESLVFARRSGPTPSAAELARPLAEGLIKSPKPLMKKQAVKRHHHKHNLRHRYEFLETLGKGTYGKVKKARESSGRLVAIKSIRKDKIKDEQDLMHIRREIEIMSSLNHPHIIAIHEVFENSSKIVIVMEYASRGDLYDYISERQQLSEREARHFFRQIVSAVHYCHQNRVVHRDLKLENILLDANGNIKIADFGLSNLYHQGKFLQTFCGSPLYASPEIVNGKPYTGPEVDSWSLGVLLYILVHGTMPFDGHDHKILVKQISNGAYREPPKPSDACGLIRWLLMVNPTRRATLEDVASHWWVNWGYATRVGEQEAPHEGGHPGSDSARASMADWLRRSSRPLLENGAKVCSFFKQHAPGGGSTTPGLERQHSLKKSRKENDMAQSLHSDTADDTAHRPGKSNLKLPKGILKKKVSASAEGVQEDPPELSPIPASPGQAAPLLPKKGILKKPRQRESGYYSSPEPSESGELLDAGDVFVSGDPKEQKPPQASGLLLHRKGILKLNGKFSQTALELAAPTTFGSLDELAPPRPLARASRPSGAVSEDSILSSESFDQLDLPERLPEPPLRGCVSVDNLTGLEEPPSEGPGSCLRRWRQDPLGDSCFSLTDCQEVTATYRQALRVCSKLT

SEQ ID NO: 641 - DNA, 2015 bp, Homo sapien
gttttctactttgcccgcccacagatgtagttttctctgcgcgtgtgcgttttccctcctcccccgccctcagggtccacggccaccatggcgtattaggggcagcagtgcctgcggcagcattggcctttgcagcggcggcagcagcaccaggctctgcagcggcaacccccagcggcttaagccatggcgtgagtaccggggcgggtcgtccagctgtgctcctggggccggcgcgggttttggattggtggggtgcggcctggggccagggcggtgccgccaagggggaagcgatttaacgagcgcccgggacgcgtggtctttgcttgggtgtccccgagacgctcgcgtgcctgggatcgggaaagcgtagtcgggtgcccggactgcttccccaggagccctacagccctcggaccccgagccccgcaaggtcccaggggtcttggctgttgccccacgaaacgtgcaggaaccaagatggcggcggcagggcggcggcgcgggcgtgagtcaagggcgggcggtgggcggggcgcggccgctggccgtatttggacgtggggacggagcgctttcctcttggcggccggtggaagaatcccctggtctccgtgagcgtccattttgtggaacctgagttgcaagcagggaggggcaaatacaactgccctgttcccgattctctagatggccgatctagagaagtcccgcctcataagtggaaggatgaaattctcagaacagctaacctctaatgggagttggcttctgattctcattcaggcttctcacggcattcagcagcagcgttgctgtaaccgacaaagacaccttcgaattaagcacattcctcgattccagcaaagcaccgcaacatgaccgaaatgagcttcctgagcagcgaggtgttggtgggggacttgatgtcccccttcgacccgtcgggtttgggggctgaagaaagcctaggtctcttagatgattacctggaggtggccaagcacttcaaacctcatgggttctccagcgacaaggctaaggcgggctcctccgaatggctggctgtggatgggttggtcagtccctccaacaacagcaaggaggatgccttctccgggacagattggatgttggagaaaatggatttgaaggagttcgacttggatgccctgttgggtatagatgacctggaaaccatgccagatgaccttctgaccacgttggatgacacttgtgatctctttgcccccctagtccaggagactaataagcagcccccccagacggtgaacccaattggccatctcccagaaagtttaacaaaacccgaccaggttgcccccttcaccttcttacaacctcttcccctttccccaggggtcctgtcctccactccagatcattcctttagtttagagctgggcagtgaagtggatatcactgaaggagataggaagccagactacactgcttacgttgccatgatccctcagtgcataaaggaggaagacaccccttcagataatgatagtggcatctgtatgagcccagagtcctatctggggtctcctcagcacagcccctctaccaggggctctccaaataggagcctcccatctccaggtgttctctgtgggtctgcccgtcccaaaccttacgatcctcctggagagaagatggtagcagcaaaagtaaagggtgagaaactggataagaagctgaaaaaaatggagcaaaacaagacagcagccactaggtaccgccagaagaagagggcggagcaggaggctcttactggtgagtgcaaagagctggaaaagaagaacgaggctctaaaagagagggcggattccctggccaaggagatccagtacctgaaagatttgatagaagaggtccgcaaggcaagggggaagaaaagggtcccctagttgaggatagtcaggagcgtcaatgtgcttgtacatagagtgctgtagctgtgtgttccaataaattattttgtaggg

SEQ ID NO: 642 - protein, 351 aa, Homo sapien
MTEMSFLSSEVLVGDLMSPFDPSGLGAEESLGLLDDYLEVAKHFKPHGFSSDKAKAGSSEWLAVDGLVSPSNNSKEDAFSGTDWMLEKMDLKEFDLDALLGIDDLETMPDDLLTTLDDTCDLFAPLVQETNKQPPQTVNPIGHLPESLTKPDQVAPFTFLQPLPLSPGVLSSTPDHSFSLELGSEVDITEGDRKPDYTAYVAMIPQCIKEEDTPSDNDSGICMSPESYLGSPQHSPSTRGSPNRSLPSPGVLCGSARPKPYDPPGEKMVAAKVKGEKLDKKLKKMEQNKTAATRYRQKKRAEQEALTGECKELEKKNEALKERADSLAKEIQYLKDLIEEVRKARGKKRVP

SEQ ID NO: 643 - DNA, 2905 bp, Homo sapien
cggcagccagctgagagcaatgggaaatggggagtcccagctgtcctcggtgcctgctcagaagctgggttggtttatccaggaatacctgaagccctacgaagaatgtcagacactgatcgacgagatggtgaacaccatctgtgacgtctgcaggaaccccgaacagttccccctggtgcagggagtggccataggtggctcctatggacggaaaacagtcttaagaggcaactccgatggtacccttgtccttttcttcagtgacttaaaacaattccaggatcagaagagaagccaacgtgacatcctcgataaaactggggataagctgaagttctgtctgttcacgaagtggttgaaaaacaatttcgagatccagaagtcccttgatgggtccaccatccaggtgttcacaaaaaatcagagaatctctttcgaggtgctggccgccttcaacgctctgagcttaaatgataatcccagcccctggatctatcgagagctcaaaagatccttggataagacaaatgccagtcctggtgagtttgcagtctgcttcactgaactccagcagaagttttttgacaaccgtcctggaaaactaaaggatttgatcctcttgataaagcactggcatcaacagtgccagaaaaaaatcaaggatttaccctcgctgtctccgtatgccctggagctgcttacggtgtatgcctgggaacaggggtgcagaaaagacaactttgacattgctgaaggcgtcagaacggttctggagctgatcaaatgccaggagaagctgtgtatctattggatggtcaactacaactttgaagatgagaccatcaggaacatcctgctgcaccagctccaatcagcgaggccagtaatcttggatccagttgacccaaccaataatgtgagtggagataaaatatgctggcaatggctgaaaaaagaagctcaaacctggttgacttctcccaacctggataatgagttacctgcaccatcttggaatgtcctgcctgcaccactcttcacgaccccaggccaccttctggataagttcatcaaggagtttctccagcccaacaaatgcttcctagagcagattgacagtgctgttaacatcatccgtacattccttaaagaaaactgcttccgacaatcaacagccaagatccagattgtccggggaggatcaaccgccaaaggcacagctctgaagactggctctgatgccgatctcgtcgtgttccataactcacttaaaagctacacctcccaaaaaaacgagcggcacaaaatcgtcaaggaaatccatgaacagctgaaagccttttggagggagaaggaggaggagcttgaagtcagctttgagcctcccaagtggaaggctcccagggtgctgagcttctctctgaaatccaaagtcctcaacgaaagtgtcagctttgatgtgcttcctgcctttaatgcactgggtcagctgagttctggctccacacccagccccgaggtttatgcagggctcattgatctgtataaatcctcggacctcccgggaggagagttttctacctgtttcacagtcctgcagcgaaacttcattcgctcccggcccaccaaactaaaggatttaattcgcctggtgaagcactggtacaaagagtgtgaaaggaaactgaagccaaaggggtctttgcccccaaagtatgccttggagctgctcaccatctatgcctgggagcaggggagtggagtgccggattttgacactgcagaaggtttccggacagtcctggagctggtcacacaatatcagcagctcggcatcttctggaaggtcaattacaactttgaagatgagaccgtgaggaagtttctactgagccagttgcagaaaaccaggcctgtgatcttggacccaggcgaacccacaggtgacgtgggtggaggggaccgttggtgttggcatcttctggacaaagaagcaaaggttaggttatcctctccctgcttcaaggatgggactggaaacccaataccaccttggaaagtgccgacaatgcagacaccaggaagttgtggagctaggatccatcctattgtcaatgagatgttctcatccagaagccatagaatcctgaataataattctaaaagaaacttctggagatcatctggcaatcgcttttaaagactcggctcaccgtgagaaagagtcactcacatccattcttcccttgatggtccctattcctccttcccttgccttcttggacttcttgaaatcaatcaagactgcaaaccctttcataaagctgccttgctgaactcctctctgcaggagccctgcttaaaatagttgatgtcatcactttatgtgcatcttatttctgtcaacttgtatttttttttcttgtatttttccaattagctcctcctttttccttccagtctaaaaaaggaatcctctgtgtcttcaaagcaaagctctttactttccccttggttctcataactctgtgatcttgctctcggtgcttccaactcatccacgtcctgtctgtttcctctgtatacaaaaccctttctgcccctgctgacacagacatcctctatgccagcagccaggccaaccctttcattagaacttcaagctctccaaaggctcagattataactgttgtcatatttatatgaggctgttgtcttttccttctgagcctgcctttatccccccacccaggagtatcctcttgccaaagcaaaagactttttccttggctttagccttaaagatacttgaaggtctaggtgctttaacctcacataccctcacttaaacttttatcactgttgcatataccagttgtgatacaataaagaatgtatctgg

SEQ ID NO: 644 - protein, 727 aa, Homo sapien
MGNGESQLSSVPAQKLGWFIQEYLKPYEECQTLIDEMVNTICDVCRNPEQFPLVQGVAIGGSYGRKTVLRGNSDGTLVLFFSDLKQFQDQKRSQRDILDKTGDKLKFCLFTKWLKNNFEIQKSLDGSTIQVFTKNQRISFEVLAAFNALSLNDNPSPWIYRELKRSLDKTNASPGEFAVCFTELQQKFFDNRPGKLKDLILLIKHWHQQCQKKIKDLPSLSPYALELLTVYAWEQGCRKDNFDIAEGVRTVLELIKCQEKLCIYWMVNYNFEDETIRNILLHQLQSARPVILDPVDPTNNVSGDKICWQWLKKEAQTWLTSPNLDNELPAPSWNVLPAPLFTTPGHLLDKFIKEFLQPNKCFLEQIDSAVNIIRTFLKENCFRQSTAKIQIVRGGSTAKGTALKTGSDADLVVFHNSLKSYTSQKNERHKIVKEIHEQLKAFWREKEEELEVSFEPPKWKAPRVLSFSLKSKVLNESVSFDVLPAFNALGQLSSGSTPSPEVYAGLIDLYKSSDLPGGEFSTCFTVLQRNFIRSRPTKLKDLIRLVKHWYKECERKLKPKGSLPPKYALELLTIYAWEQGSGVPDFDTAEGFRTVLELVTQYQQLGIFWKVNYNFEDETVRKFLLSQLQKTRPVILDPGEPTGDVGGGDRWCWHLLDKEAKVRLSSPCFKDGTGNPIPPWKVPTMQTPGSCGARIHPIVNEMFSSRSHRILNNNSKRNFWRSSGNRF

SEQ ID NO: 645 - DNA, 2566 bp, Homo sapien
tgttaggcagcaacagtgctgatgctggactgtggcaggcagagggtgctatcctgacacacttcaccttagtgcaggaaacttcaatttggtggaagaaaggcgatttcgaggttccaatctgggcgacacttcccagttggagagtcagcaaaagggagagggcaattccaagaagagggaaaagcttgtgcacagtgtacctcctttattcctgaagcccgggcagtgcttgacctggtcgaccagtgcccaaaacagatccagaaaggaaagttccaggttgttgccatcgaaggactggatgccacgggtaaaaccacggtgacccagtcagtggcagattcacttaaggctgtcctcttaaagtcaccaccctcttgcattggccagtggaggaagatctttgatgatgaaccaactatcattagaagagctttttactctttgggcaattatattgtggcctccgaaatagctaaagaatctgccaaatctcctgtgattgtagacaggtactggcacagcacggccacctatgccatagccactgaggtgagtgggggtctccagcacctgcccccagcccatcaccctgtgtaccagtggccagaggacctgctcaaacctgaccttatcctgctgctcactgtgagtcctgaggagaggttgcagaggctgcagggccggggcatggagaagaccagggaagaagcagaacttgaggccaacagtgtgtttcgtcaaaaggtagaaatgtcctaccagcggatggagaatcctggctgccatgtggttgatgccagcccctccagagaaaaggtcctgcagacggtattaagcctaatccagaatagttttagtgaaccgtagttactctggccaggtgccacgtctaactagattagatgttgtttgaaacatctacatccaccatttgttatgcagtgttcccaaatttctgttctacaagcatgttgtgtggcagaaaactggagaccaggcatcttaattttacttcagccatcgtaccctcttctgactgatggacccgtcatcacaaaggtccctctcatcatgttccagtgagaggccagcgattgctttcttcctggcatagtaaacattttcttggaacatatgtttcacttaatcactaccaaatatctggaagacctgtcttactcagacagcaccaggtgtacagaagcagcagacaagatcttccagatcagcagggagaccccggagcctctgcttctcctacactggcatgctgatgagatcgtgacatgcccacattggcttcttccacatctggttgcactcgtcatgatgggctcgctgcatctccctcagtcccaaattctagagccaagtgttcctgcagaggctgtctatgtgtcctggctgcccaaggacactcctgcagagccatttttgggtaaggaacacttacaaagaaggcattgatcttgtgtctgaggctcagagcccttttgataggcttctgagtcatatataaagacattcaagccaagatgctccaactgcaaatataccaaccttctctgaattatattttgcttatttatatttcttttctttttttctaaagtatggctctgaatagaatgcacattttccattgaactggatgcatttcatttagccaatccagtaatttatttatattaatctatacataatatgtttcctcagcataggagctatgattcattaattaaaagtggagtcaaaacgctaaatgcaatgtttgttgtgtattttcattacacaaacttaatttgtcttgttaaataagtacagtggatcttggagtgggatttcttggtaaattatcttgcacttgaatgtctcatgattacatatgaaatcgctttgacatatctttagacagaaaaaagtagctgagtgagggggaaattatagagctgtgtgactttagggagtaggttgaaccaggtgattacctaaaattccttccagttcaaaggcagataaatctgtaaattattttatcctatctaccatttcttaagaagacattactccaaaataattaaatttaaggctttatcaggtctgcatatagaatcttaaattctaataaagtttcatgttaatgtcataggatttttaaaagagctataggtaatttctatataatatgtgtatattaaaatgtaattgatttcagttgaaagtattttaaagctgataaatagcattagggttctttgcaatgtggtatctagctgtattattggttttatttactttaaacattttgaaaagcttatactggcagcctagaaaaacaaacaattaatgtatctttatgtccctggcacatgaataaactttgctgtggtttactaatctatgctgtcatcctgggtacatattgatttgtctgaaaagtgctttctcagattccccttttaatattgtgatgtaaaggagggaaattttggtaaaggaagttgaaaggtgtgagctggcaggctaagtggaatttgtggttagagtgctttcagagaaa

SEQ ID NO: 646 - protein, 290 aa, Homo sapien
LGSNSADAGLWQAEGAILTHFTLVQETSIWWKKGDFEVPIWATLPSWRVSKRERAIPRRGKSLCTVYLLYIPEARAVLDLVDQCPKQIQKGKFQVVAIEGLDATGKTTVTQSVADSLKAVLLKSPPSCIGQWRKIFDDEPTIIRRAFYSLGNYIVASEIAKESAKSPVIVDRYWHSTATYAIATEVSGGLQHLPPAHHPVYQWPEDLLKPDLILLLTVSPEERLQRLQGRGMEKTREEAELEANSVFRQKVEMSYQRMENPGCHVVDASPSREKVLQTVLSLIQNSFSEP

SEQ ID NO: 647 - DNA, 464 bp, Homo sapien
aaggggtaaatacccattatcagaaagtttattttccctcatgatggaagcttaataaagggtttctatattttggacacccagagaattgctcaaatgtgattttagtgtaataggtctttcttttttcattgagttgatttttaagcatttaatacattgccttgtacaactccaagcttctctatagtcaagagcccaagctagatattttgtgggaaacttaactttaaattccaaacctttgctgaaattgacattgtcactttttgtgctgtgccttggatttgtattcttactcttcttgaggaaagatagaaggcagttgaactttgtgaccaagagcgtttcattggcagtccctgcatgattgataatttgtagatacaatattattgcatttctttacatgtattcattttcctgaagagtattatcttgtgcttttaataaaataacatgtg

SEQ ID NO: 648 - protein, 17 aa, Homo sapien
RGKYPLSESLFSLMMEA

SEQ ID NO: 649 - DNA, 1058 bp, Homo sapien
aagctgccgcagttagttggagtctaaggactcgtgacaatcttcgggtgcccttcgagagaaaaggggaggatgccactggagtcatcctcttcaatgccactatccttcccatctctcttaccctcagtaccacacaatactaacccttcccctcctctgatgtcttacatcacctcccaggagatgaagtgtattcttcactggtttgccaattggtcaggtccccagcgtgaacgtttcctagaggacctggtggctaaggcagtgccagaaaaattacaaccactgctggatagtctggagcagcttagtgtgtctggggcagaccgaccaccttctatctttgagtgccagctacatctttgggatcagtggtttcgaggctgggctgagcaggagcgcaatgaatttgtcagacagctggagttcagtgagccagacttcgtggcaaagttttaccaagcagtggctgctacagctggtaaggactgataggcattcagaccaaagaagataaccatagctgatggagccatgactctctacaatgataactcaattcaaatgtgtcgcctaaagctctggaactggtattccaaccagctgaccgaactcactgaccagtacaggcatggttatttcaatattaatagcatgtcaactggactcctatttgtaaatgttatcaatctaagcaatccagctcatcagtctactagtttgcttctttccgagagatgtcaagtcctcaagaatttgatggcttcttctgcagctataaccacaaggaacctacacattgtaactcaagtccactgctggctcatgaaatgtgtaaagtagaaccctccttcccgagaaataagacaggacaataaaaggtggcgtttttgtactttacctggattccattggctggttttaccactcctatcagattgtagtgtaattgtgtgatacgcaaaccattagtttacccagtgatgatttaataaaattatgaaaaatcaggaaaaaaaaaaaaaaaaaaaaaaaaaaaaaaaaaaaaaaaaaaa

SEQ ID NO: 650 - protein, 140 aa, Homo sapien
MPLESSSSMPLSFPSLLPSVPHNTNPSPPLMSYITSQEMKCILHWFANWSGPQRERFLEDLVAKAVPEKLQPLLDSLEQLSVSGADRPPSIFECQLHLWDQWFRGWAEQERNEFVRQLEFSEPDFVAKFYQAVAATAGKD

SEQ ID NO: 651 - DNA, 4322 bp, Homo sapien
gggaccgacgacacgcccccctctcctcctttgttccgggggtcggcggccgctctcctgccagagctcgggatctcggccccgggaggcgggcgctcgggcgcagccgcgaagatgccgttggaactgacgcagagccgagtgcagaagatctgggtgcccgtggaccacaggccctcgttgcccagatcctgtgggccaaagctgaccaactcccccaccgtcatcgtcatggtgggcctccccgcccggggcaagacctacatctccaagaagctgactcgctacctcaactggattggcgtccccacaaaagtgttcaacgtcggggagtatcgccgggaggctgtgaagcagtacagctcctacaacttcttccgccccgacaatgaggaagccatgaaagtccggaagcaatgtgccttagctgccttgagagatgtcaaaagctacctggcgaaagaagggggacaaattgcggttttcgatgccaccaatactactagagagaggagacacatgatccttcattttgccaaagaaaatgactttaaagcgtttttcatcgagtcggtgtgcgacgaccctacagttgtggcctccaatatcatggaagttaaaatctccagcccggattacaaagactgcaactcggcagaagccatggacgacttcatgaagaggatcagttgctatgaagccagctaccagcccctcgaccccgacaaatgcgacagggacttgtcgctgatcaaggtgattgacgtgggccggaggttcctggtgaaccgggtgcaggaccacatccagagccgcatcgtgtactacctgatgaacatccacgtgcagccgcgtaccatctacctgtgccggcacggcgagaacgagcacaacctccagggccgcatcgggggcgactcaggcctgtccagccggggcaagaagtttgccagtgctctgagcaagttcgtggaggagcagaacctgaaggacctgcgcgtgtggaccagccagctgaagagcaccatccagacggccgaggcgctgcggctgccctacgagcagtggaaggcgctcaatgagatcgacgcgggcgtctgtgaggagctgacctacgaggagatcagggacacctaccctgaggagtatgcgctgcgggagcaggacaagtactattaccgctaccccaccggggagtcctaccaggacctggtccagcgcttggagccagtgatcatggagctggagcggcaggagaatgtgctggtcatctgccaccaggccgtcctgcgctgcctgcttgcctacttcctggataagagtgcagaggagatgccctacctgaaatgccctcttcacaccgtcctgaaactgacgcctgtcgcttatggctgccgtgtggaatccatctacctgaacgtggagtccgtctgcacacaccgggagaggtcagaggatgcaaagaagggacctaacccgctcatgagacgcaatagtgtcaccccgctagccagccccgaacccaccaaaaagcctcgcatcaacagctttgaggagcatgtggcctccacctcggccgccctgcccagctgcctgcccccggaggtgcccacgcagctgcctggacaaaacatgaaaggctcccggagcagcgctgactcctccaggaaacactgaggcagacgtgtcggttccattccatttccatttctgcagcttagcttgtgtcctgccctccgcccgaggcaaaacgtatcctgaggacttcttccggagagggtggggtggagcagcgggggagccttggccgaagagaaccatgcttggcaccgtctgtgtcccctcggccgctggacaccagaaagccacgtgggtccctggcgcctgcctttagcctgggggcccccacctccactctctgggttcctaggaatgtccagcctcggagaccttcacaaagccttgggagggtgatgagtgctggtcctgacaagaggccgctggggacactgtccgttttgtttcgtttctgtgatctcccggcacgtttggagctgggaagaccacactggtggcagaatcctaaaattaaaggaggcagcctcctagttgctgaaagttaaggaatgtgtaaaacctccacgtgactgtttggtgcatcttgacctgggaagacgcctcatgggaacgaacttggacaggtgttgggttgacccctcttctgcaggaagtccctgagctgagacgcaaagttggctgggtggtggtcggcaccctggctcctgcaggtccacacaccttccaggcctgtggcctgcctccaaagatgtgcaagggcaggctggctgcacggggagagggaagtattttgccgaaatatgagaactggggcctcctgctcccagggagctccagggcccctctctcctcccacctggacttggggggaactgagaaacactttcctggagctgctggcttttgcacttttttgatggcagaagtgtgacctgagagtcccaccttctcttcaggaacgtagatgtcggggtgtcttgccctggggggcttggaacctctgaaggtggggagcggaacacctggcatccttccccagcacttgcattacggtccctgctcttccaaggtggggacagtggcccaagcaaggcctcacacgcagccacttcttcaagagctgcctgcacactgtcttggagcatctgccttgtgcctggcactctgccggtgccttgggaaggtcggtaagagtggactttgtcctgggcttcccttcatggcgtctagacacttttgtggtgatggaaagcatgggacctgtcgtctcagcctgttggtttctcctcattgcctcaaaccctggggtaggtggaacggggggtctcgtgcccagatgaaaccatttggaaactcggcagcagagtttgtccaaatgacccttttcaggatgtctcaaagcttgtgccaaaggtcacttttctttcctgccttctgctgtgagccctgagatcctcctcccagctcaagggacaggtcctgggtgagggtgggagatttagacacctgaaactgggcgtggagagaagagccgttgctgtttgttttttgggaagagcttttaaagaatgcatatttttttacctggttggaattgagtaggaactgaggctgtgcttcaggtatggtacaatcaagtgggggattttcatgctgaacccattcaaagccctccccgtccccgcatttccaggccaccctttggctggcgtctgctggagaggatgtctctgtcgcattcccgtgcagctcagctcgcgcaggttttctctctctccctggatgttgagctctcatcagaatatgtgggtggggggtggacgtgcacgggtgcatgattgtgcttaacttggttgtatttttcgatttgacatggaagcctgttgctttgctctagagaatagtttctcgtgtccccttcgcacgcctcattctttgaacctcatctctgatgtttgatacagatgggggcttgatagctgtggtcccctttcccttctgactacgtgaaaatcaatacctaaatacagaagccttggtctaaacaccgagacttttagtttgcgaaggggcttagatagggagagaggtaacatgaatctggacaggggagggagatactatagaaaggagaacactgcatactttgcaaagccagtgacctccttttgaaggggacattggacgggggccgggggcgggggttcggtttgactaccgtcatgaacttttggcgtatactgattcctccaactctccaccccacaaaataacggggaccaatatttttaactttgcctatttgtttttgggtgagtttcccccctccattattctgtcctgagaccacgggcaaagctcttccattttgagagagaagaaaaactgtttggaaccacaccaatgatatttttctttgtaatacttgaaatttatttttttattattttgatagcagatgtgctatttatttatttaatatatgtataaggagtcctaaacaatagaaagctgtagaagctgtagagataggcttcagttgttaattggtttggagcctcctatgtgtgacttatgactctctgtgttctgtgtatttgtctgaattaatgacctgggatataaagctatgctagctttcaaacaggagatgccttcagaaagctttgtatattttgcagttgccagaccaataaaatacctggttgaaatacatggacgaaaaaaaaaaaaaaaaaaaaaaa

SEQ ID NO: 652 - protein, 520 aa, Homo sapien
MPLELTQSRVQKIWVPVDHRPSLPRSCGPKLTNSPTVIVMVGLPARGKTYISKKLTRYLNWIGVPTKVFNVGEYRREAVKQYSSYNFFRPDNEEAMKVRKQCALAALRDVKSYLAKEGGQIAVFDATNTTRERRHMILHFAKENDFKAFFIESVCDDPTVVASNIMEVKISSPDYKDCNSAEAMDDFMKRISCYEASYQPLDPDKCDRDLSLIKVIDVGRRFLVNRVQDHIQSRIVYYLMNIHVQPRTIYLCRHGENEHNLQGRIGGDSGLSSRGKKFASALSKFVEEQNLKDLRVWTSQLKSTIQTAEALRLPYEQWKALNEIDAGVCEELTYEEIRDTYPEEYALREQDKYYYRYPTGESYQDLVQRLEPVIMELERQENVLVICHQAVLRCLLAYFLDKSAEEMPYLKCPLHTVLKLTPVAYGCRVESIYLNVESVCTHRERSEDAKKGPNPLMRRNSVTPLASPEPTKKPRINSFEEHVASTSAALPSCLPPEVPTQLPGQNMKGSRSSADSSRKH

SEQ ID NO: 653 - DNA, 3032 bp, Homo sapien
agtcgctgtttgggacgctgggtgtgcggtgttctgtctccgctcccgtttcgctgtcacagcccgttccttcccggagcccgggacaggctgggcgcgcgcccgtgtgagtgagcgggactcagggcagaagtgtcccctcactgcgtttttttttccttttatccaaagaacggggcagttagtacgcttgccttcctgtcgcccggttgggagcggggttggtgtgcggagtggttcgcctttttttctttagaacttgtgagcctttttttttttttttttttctttcctttttttaggctcagtgctgtccgggctggtttgcccggtccctgactaacggctttctgccccttctctcgccacccctgcccaaggtcgcccctctgccttcgcccctgtcccgggagggtgggaagctttgaccccgccctgcccactcgcgtctccgcagccgtagccgcgcctgtcccaatatgaatagggtcaacgacccacttatttttataagagatattaagcccggactgaaaaacttaaatgtcgtctttattgtcctggagataggacgcgtgaccaaaaccaaagacggccatgaagtgagatcgtgcaaagtagcagataaaacgggcagcatcactatttccgtgtgggatgagatcggaggtcttatacagccaggggatattattcggttgaccagagggtatgcatccatgtggaaaggatgtctgacactttatactggaaggggtggtgaacttcaaaaaattggggatctaggtgcggtgcaggcagccgcaatgcgagattccatacactactaccctggtaatgatctccaccctgacctggaggagccatcctctctaggggtgtaagattttgtatggtttattcagaagtgccaaatttcagtgaacccaacccagattatcgaggacagcagaacaaaggggcacagagtgaacagaagaataattccatgaatagtaatatgggtacaggtacatttggaccagtgggaaatggtgttcacactggccctgaatcaagggaacaccagttttcacatgctggcagaagcaatggccggggacttataaatccacaactacaaggaacagctagtaatcaaacagtgatgaccacaataagtaatggcagggaccctcggagagcctttaaaagatgacctatgctaaatactcatgtgtagtttttatactacatgccctacttgaacacttattgcacttttatttattgttaactgtgaaaagtacgtcctttattgggtttccttttatattcttggtttgttaagaagaatggtttgtttttatagcaaaactgttaagctgctcgagtctcctgttgaagaatgggaacactgaaaagtaggggcatttatttttagagtaaaaagattattggatagcctttaaaaaacctgcacccatttcatgggtgagttacttaagacatcagctttatagcctctatgagtctatcttctgtataagttttgtaatatttaacataaggcttaatgggagatgttcttttgtcttgtattcagatattgccaactaaagcaataaccatcaaaaaacacaagaacttgtcaatgctagcagtaatttttgagtgtttgtggctctcggaatgattgacttcgttcagtgactactattaagattttccaaggactgactcatcccaaatttttgttgtattaccaaaaaaacagattccttatcagaatttggaatagaatgtgatctctattgcaacaagtaattttaaaagaaagctacatttattttagagtagtgctcctaacatgtattatcaactttgtggattacattggaggaaaatttaaaactggggccttgaatatttattttttgaaactaccatgttaaatactgaagtataatttgggggagttataaagttatgataaacattcatctgattattttaaacaatagttgtggtagataaacatactggaggtgagtaaaattgaattcatatagtaacatgcagtctgaagtcctagttacttaataggtactcagcctggagtgaaaatcctgggtactgactttgagaggagtgagtgtgcatgttgtcaaagtttctgaacacagttcacatagccttattagcaaaagttttaagaaatggctctatcaaagaagcaattgcagctttattcagaaatataaaagtggaatttatgtacatgtcataagtggtacccacttcccctttttactgtagggtggataactcttaggatttaactctttgaatattatctcttgaataaagcatgtgttaatgttaacaaacctacgtaatttttgccctttcaatgacttacagtggagagccagtacatcttaactactgttgtagtgatggtatcaacctcatggttacttagctctgcatttgttgctttgttttttttccacttcaaatcacaaaataagtagattttgttttctgaaaactccatagcatttgaatacaaaaagttgtgccagattgtttgccctaattcactgtgtttaacaaatatttcagtacacactatgtattaggcactgtgtggaaagtgttaaggggtagacaagataccgaataatctccacaagtttatttgtggtctatagtacttttgtaactggggttacaaaaattatagaaatttttttcctttgttcatatgcatattcatgattataatttggctttgtttgtgattaatgttttcttaagattttcacattatagaatacctcaaaagaagttgtctaaggactgggatagagagtatgtttcataaaattgtagatgtttagaatttttaaaaaccctacaaattagtatatgattgttttatataagtaagataggagcaacactttaaattatttgtgggagaatacagcattaaaggtgattttaaaagaaaaaaaaaaaaaaaaaaaaaaaaaaaaaaaaaaaaa

SEQ ID NO: 654 - protein, 134 aa, Homo sapien
MNRVNDPLIFIRDIKPGLKNLNVVFIVLEIGRVTKTKDGHEVRSCKVADKTGSITISVWDEIGGLIQPGDIIRLTRGYASMWKGCLTLYTGRGGELQKIGDLGAVQAAAMRDSIHYYPGNDLHPDLEEPSSLGV

SEQ ID NO: 655 - DNA, 2016 bp, Homo sapien
ccatctcaaaacaacaaaaacaacaaaaaaaccacatgcctggcggagaacaaagagatcatttagtccaatctcttcatggagatgagggctcctgggagcccctcttcatgtctcaggttcttagttgactatgtttatccaaatgattccagattcctgtggaaacaaggaatcgatgtacaaatggggtagggtggcaaggaaaactcttaagagagaaacatcaaggttttcacattaggttaaagacaagaaggtttctaggcaggtagtgtaatgtctaggtgattttgaagtgaacttaagccactaggtttgagggacaaaggacagtagaaaatggtgaagactgcagatcacctgctatacctcaaggagcagcggacccagcagaatatggcccaaaaaggaggcaggtctcctgttgcaagagcctctgtttttttaaagagaaaacaaagaatcctggtttttatgtgaaatctctaattttaaaataataactcattaaaaatattgtaatgtccaaaagtatctttccatttaacttctaaaaatctcttaaatgttttttttaaataattgtaaagtgagtttttgttaagcttataggaatgggccagttaactaaggtagacagatgtaggaaattaaatatttgatttacttagggatctatatgacatcagttatcaaagaatacattttaacccaaaagtataccatgctcattgtatctttgatcgttcttcaagtatttctcaatcttttaatctatcaggaacattactatcaagagcagattgttgtaacataatactcaggatacatgaaatgtatgtgagagataaatagataatagaaagtttattgttataaaaatgacctacaacttatataaaaaaattctgaaaatgttgactttttttggactgaaggctgcaaaataaatggcttctcaaagtaaattcctatttacttaaattgccttcttgattgttacacctggaaaaatatattcatctactttttccttttaattatgttagtagactgaattaaaccagctacatagacactctctcatttgaagctgttgggatccttgagttgcctctttcattggtacgttttatccattgtcacaactgtggtcttcattaataactcattttaatgtcttaggagtagaatgtgtttccttattttttttcaaataagagtcagttaatttgaaatggcaaattatttacctgaatgtgtatcattgttcatttgcaaggtttaagctcaggcagatccaataattaggtaaaggttgcatctttggtcctcttgcacattttttctggtaatcaaatctgaagcgacatctcagcaagcagacttgggttattttccactaggatgggaatggaaaacagtgctggagactgggaagtggctatttcctgtgtctcactggggaattgcaagatcaaagaatgttgttacttttatgtgatgaaaaaatagggcaagaaagatatacctgaatcatcagactgcttaaaatttgggaggaaaaaattctattttactactaaccataaatcacttttgctagatagtactttaaagattctgaattaaatgtatctttaaaaacaacaatataatattactaaaaaatgcagacatacttaaacttgctagaataaattctgtgaggtcttcgtttggtattttcataggatttcttactgttaagttattggaaaatgaaaatataaagtgctttcagaagttatagtattttccaattcattgaattactttgcttgtgaaaatatattaaacatatttaaatgagacctatcctacatttaaaaaccagttttgtttatataaaattgtatttgaaaggtcctgaacattaaaaatgtgaaaatttataatgttgatgatcaaaagtaacgtgttgagactctgagcttaatccattaaatggattttagaatctagtagaagtta

SEQ ID NO: 656 - protein, 42 aa, Homo sapien
ISKQQKQQKNHMPGGEQRDHLVQSLHGDEGSWEPLFMSQVLS

SEQ ID NO: 657 - DNA, 1790 bp, Homo sapien
ggggcggccctggccagaagcggaggaggtggcacccgggaccgagctggggtcttggaggaagagaggatggcgtcgtcgagccctgactccccatgttcctgcgactgctttgtctccgtgcccccggcctcagccatcccggctgtgatctttgccaagaactcggaccgaccccgggacgaggtgcaggaggtggtgtttgtccccgcaggcactcacactcctgggagccggctccagtgcacctacattgaagtggaacaggtgtcgaagacgcacgctgtgattctgagccgtccttcttggctatggggggctgagatgggcgccaacgagcatggtgtctgcattggcaacgaggctgtgtggacgaaggagccagttggggagggggaagccctgctgggcatggacctactcaggctggctttggaacggagcagctctgcccaggaggccttgcatgtgatcacagggttactggagcactatgggcaggggggcaactgcctggaggatgctgcgccattctcctaccatagcaccttcctgctggctgaccgcactgaggcgtgggtgctggagacagctgggaggctctgggctgcacagaggatccaggagggggcccgcaacatctccaaccagctgagcattggcacggacatctcggcccaacacccggagctgcggactcatgcccaggccaagggctggtgggatgggcagggtgcctttgactttgctcagatcttctccctgacccagcagcctgtgcgcatggaggctgccaaggcccgcttccaggcagggcgggagctgctgcggcaacggcaagggggcatcacggcagaggtgatgatgggcatcctcagagacaaggagagtggtatctgtatggactcgggaggctttcgcaccacggccagcatggtgtctgtcctgccccaggatcccacgcagccctgcgtgcactttcttaccgccacgccagacccatccaggtctgtgttcaaacctttcatcttcggggtgggggtggcccaggccccccaggtgctgtcccccacttttggagcacaagaccctgttcggaccctgccccgattccagactcaggtagatcgtcggcataccctctaccgtggacaccaggcagccctggggctgatggagagagatcaggtatcccccagggagtaggggctaccttgaggggatgatagacctcccccactcccagtgggactctggaaatatgaaggaactagggagtggaagagatttcagagctggggagaggagttcctcccttcaaagccagcaactgcctttggggaatgtcggggggtctctcctttctcctgcttgtgtgaggtggtacacagtccccccttcacctggcgggaagcctgtcccggacagactcatctcagctttcccttggggcaggatcgggggcagcagctccagcagaaacagcaggatctggagcaggaaggcctcgaggccacacaggggctgctggccggcgagtgggccccacccctctgggagctgggcagcctcttccaggccttcgtgaagagggagagccaggcttatgcgtaagcttcatagcttctgctggcctggggtggacccaggacccctggggcctgggtgccctgagtggtggtaaagtggagcaatcccttcacgctccttggccatgttctgagcggccagcttggcctttgccttaataaatgtgctttattttcaaaaaaaaaaaaaaaaaaaaaaaa

SEQ ID NO: 658 - protein, 401 aa, Homo sapien
GAALARSGGGGTRDRAGVLEEERMASSSPDSPCSCDCFVSVPPASAIPAVIFAKNSDRPRDEVQEVVFVPAGTHTPGSRLQCTYIEVEQVSKTHAVILSRPSWLWGAEMGANEHGVCIGNEAVWTKEPVGEGEALLGMDLLRLALERSSSAQEALHVITGLLEHYGQGGNCLEDAAPFSYHSTFLLADRTEAWVLETAGRLWAAQRIQEGARNISNQLSIGTDISAQHPELRTHAQAKGWWDGQGAFDFAQIFSLTQQPVRMEAAKARFQAGRELLRQRQGGITAEVMMGILRDKESGICMDSGGFRTTASMVSVLPQDPTQPCVHFLTATPDPSRSVFKPFIFGVGVAQAPQVLSPTFGAQDPVRTLPRFQTQVDRRHTLYRGHQAALGLMERDQVSPRE

SEQ ID NO: 659 - DNA, 1816 bp, Homo sapien
gcggccgcgcggcctcccgggcgggcctacagccatgtcccgggacccggggtcgggcggctgggaggaggccccgcgcgcagctgccgcgctctgcaccctgtaccacgaggccggacagcggctgcgccgcctgcaggaccagctcgctgcccgcgacgccctcatcgctcgcctccgcgcccgcctggccgcgctggagggggacgccgcgccgtccctagtggacgcgctgctggagcaggttgcgcgcttccgggagcagctgcgaaggcaggagggcggcgccgccgaggcccagatgcgccaggaaattgagaggctgactgagcgactagaagaaaaagagagggagatgcagcagctgctgagccagccccaacacgagcgagagaaggaagtcgtcctgctacggaggagcatggcagaaggggagcgcgcccgggccgccagtgacgtcctgtgccgctccttggccaacgagacccatcatctgcggaggacgctgaccgccaccgcccacatgtgtcagcatctggccaagtgtctggatgaacgacagcatgcacaaaggaatgtgggggagagaagtcctgaccagtcggaacacacagatgggcacacctctgtccagagtgttattgagaagttgcaggaagaaaatcgactgttaaaacagaaggtgactcacgttgaagacctcaatgccaagtggcagcgctacaacgccagcagggacgaatacgtgagggggctccatgcgcagctcagggggctgcagatcccccacgagcccgagctgatgaggaaggagatctcccggctcaacagacagttggaagagaaaataaatgactgtgccgaagtgaagcaggagctggcggcctccaggacggcccgggatgctgcgttggagcgggtgcagatgctggaacagcagattctcgcttacaaggatgacttcatgtcagaaagggccgatcgggaacgggctcaaagtaggattcaagaactggaggaaaaggtcgcctctttgctgcaccaggtgtcctggagacaggattctcgagagccagacgccggccggattcacgctgggagcaaaactgccaagtatttggccgccgacgcattagagcttatggtgcctggtggctggaggcctgggactgggtcccagcagccagaaccccctgcagagggcgggcatcctggcgcggcccagagaggccagggggaccttcagtgccctcactgcctgcagtgcttcagtgacgagcaaggggaagagctcctcaggcatgtggccgagtgctgccagtgaccgagactcacccgtgcccttgcggcctcctggcccggtgcagctgccctcagggacagggtgggtgctctcagatgccatgggttgagctctactgagagccaaggcccctagaatagttgcggggcactctgatcgttcactttggtccctttggctatggaacaggctgggtcacagggaactgccagtgaggctggaggctggaggtggagatggggtcaggaacatctggcagagggaggtcccagtctgtgtctccatcaggcttaagccagagctatctggtgctggtgtgccagcccctcccccagcctgcctagaaaggggtggctgcctgagggagtcacttgtatggtccccagggtgggagccccatcctgttctatggaataaagcgtcgcctctctgcctcgaaccagtcaaatggagtattgcggctgcacgtcacactagggtggccacccccgccattgcgagccacatgtctgc

SEQ ID NO: 660 - protein, 429 aa, Homo sapien [sequence omitted]

SEQ ID NO: 661 - DNA, 706 bp, Homo sapien
cctgtttcttaatggctctttttcaaaggttaatgtaagctttttggaaattcacattgtcttcctgacagttatagggcaaagtagtatctacaccctgggaacacctagcacatctgttcttagaagcccttagcagttgttcatgagctttgatttttaaaaaactcctttggccttgcttttgatgccttgatgtgtttttttcatcacctttggttatatcagtaagcattgaagcaccctctctgctggtacttggtgtcttagcctgaagctccctttgacgttccctggaggtggaaagcactctttttattttgatgtcaccattttgtttttgctttgatggcatttgggcctggaatatagaccctctattggcaccggtagcctttatgtgcctacgaggctcaaagccctgcctgtgcccaccgggcctgtctcataccaggaggctatttctctgtctgtcctggggaagccacagaaccagtgcaaaggagttgaggggtagttttttattgttgctgttgttgggtgcccttctcaatcattgcctttctagatagccatctggatcaccttttcttcctaaaatgtgaaaaggcccacacccctatgcattttattgttcccaagtattatatgtttgtgtcatatatcatatgtatatattcacatatatatatgtttttttttaacc

SEQ ID NO: 662 - protein, 82 aa, Homo sapien [sequence omitted]

SEQ ID NO: 663 - DNA, 1553 bp, Homo sapien
gtccatggggaagctgccattttcttgaaaaagccagaattgcacagaaaggaggtgctgaagcaatgttagttgtcaataacagtgtcctatttcctccctcaggtgacagatctgaatttcctgatgtgaaaatactgattgcatttataagctacaaagactttagagatatgaaccagactctaggagataacattactgtgaaaatgtattctccatcgtggcctaactttgattatactatggtggttatttttgtaattgcggtgttcactgtggcattaggtggatactggagtggactagttgaattggaaaacttgaaagcagtgacaactgaagatagagaaatgaggaaaaagaaggaagaatatttaacttttagtcctcttacagttgtaatatttgtggtcatctgctgtgttatgatggtcttactttatttcttctacaaatggttggtttatgttatgatagcaattttctgcatagcatcagcaatgagtctgtacaactgtcttgctgcactaattcataagataccatatggacaatgcacgattgcatgtcgtggcaaaaacatggaagtgagacttatttttctctccggactgtgcatagcagtagctgttgtttgggctgtgtttcgaaatgaagacaggtgggcttggattttacaggatatcttggggattgctttctgtctgaatttaattaaaacactgaagttgcccaacttcaagtcatgtgtgatacttctaggccttctcctcctctatgatgtattttttgttttcataacaccattcatcacaaagaatggtgagagtatcatggttgaactcgcagctggaccttttggaaataatgaaaagttgccagtagtcatcagagtaccaaaactgatctatttctcagtaatgagtgtgtgcctcatgcctgtttcaatattgggttttggagacattattgtaccaggcctgctgattgcatactgtagaagatttgatgttcagactggttcttcttacatatactatgtttcgtctacagttgcctatgctattggcatgatacttacatttgttgttctggtgctgatgaaaaaggggcaacctgctctcctctatttagtaccttgcacacttattactgcctcagttgttgcctggagacgtaaggaaatgaaaaagttctggaaaggtaacagctatcagatgatggaccatttggattgtgcaacaaatgaagaaaaccctgagatatctggtgaacagattgtccagcaataatattatgtggaactgctataatgtgtcattgattttctacaaatagacttcgactttttaaattgacttttgaattgacaatctgaaagagtcttcaatgatatgcttgcaaaaatatatttttatgagctggtactgacagttacatcataaataactaaaacgctttgcttttaatgttaaagttgtgccttcacattaaataaaacatatggtctgtgtagtttccgagatgtactatatacagtatatttttct

SEQ ID NO: 664 - protein, 409 aa, Homo sapien
MLVVNNSVLFPPSGDRSEFPDVKILIAFISYKDFRDMNQTLGDNITVKMYSPSWPNFDYTMVVIFVIAVFTVALGGYWSGLVELENLKAVTTEDREMRKKKEEYLTFSPLTVVIFVVICCVMMVLLYFFYKWLVYVMIAIFCIASAMSLYNCLAALIHKIPYGQCTIACRGKNMEVRLIFLSGLCIAVAVVWAVFRNEDRWAWILQDILGIAFCLNLIKTLKLPNFKSCVILLGLLLLYDVFFVFITPFITKNGESIMVELAAGPFGNNEKLPVVIRVPKLIYFSVMSVCLMPVSILGFGDIIVPGLLIAYCRRFDVQTGSSYIYYVSSTVAYAIGMILTFVVLVLMKKGQPALLYLVPCTLITASVVAWRRKEMKKFWKGNSYQMMDHLDCATNEENPEISGEQIVQQ

SEQ ID NO: 665 - DNA, 501 bp, Homo sapien
  unsure 32: unknown base
atattccccatctgattccactatgagcagtnccatgcatgccctactagaactgtggatacgctttaaaacaagtggaagatgatagggtgggactcattacgtctaatcttggggaacactgataacgtgtccaggagagacagcacaaggggctccatcttcatcacacaactcatcgcatgcttccagagatattcctggcgctgccacctagaggaagtattttggaaggttcagcaagcatttgaaagtccggaggcaacagtccaaatgcccaccatagaacgagtgtccatgacaagatatttctacctctttcctggcaactgaaaatggttaagcattgagagttgttggtggtgtatgaaataaatgaaagtgtgatattggaggaaaccacaagcagcccagccctcctttatcaacttcaagaaacacctttactagtacagattgaatgcttaacattttgtatttcaataaaggtgaagacaaatg

SEQ ID NO: 666 - protein, 83 aa, Homo sapien
MIGWDSLRLILGNTDNVSRRDSTRGSIFITQLIACFQRYSWRCHLEEVFWKVQQAFESPEATVQMPTIERVSMTRYFYLFPGN

SEQ ID NO: 667 - DNA, 1258 bp, Homo sapien
ttgatgcttcgctttctgggtgaaaaagctgcagcaaagagacaagtcctaaatgccgactcagtggaacaatcttttgttggattgaaacagctaatcagctgcagaaactggagggcagcagtggacctgtgcggacgtctcctcacagcccacggccagggctacggcaagagcgggctgctcaccagccacacgacagattcactgcagctctggtttgtcaggctggcactactagtgaagttgggccttttccagaatgctgagatggaatttgagcccgtcggaaatcttgatcagccagatctttattacgagtactacccgcacgtgtaccctgggcgcaggggctccatggtccccttctcgatgcgcatcttgcacgcggatttgcagcagtacctggggaacccacaggagtcgctggatagactgcacaaggtgaagactgtctgcagcaagatcctggccaatttggagcaaggcttagcagaagacggcggcatgagcagcgtgactcaggagggcagacaagcctctatccggctgtggaggtcacgtctgggccgggtgatgtactccatggcaaactgtctgctcctgatgaaggattatgtgctggccgtggaggcgtatcattcggttatcaagtattacccagagcaagagccccagctgctcagcggcatcggccggatttccctccagattggagacataaaaacagctgaaaagtattttcaagacgttgagaaagtaacacagaaattagatggactacagggtaaaatcatggttttgatgaacagcgcgttccttcacctcgggcagaataactttgcagaagcccacaggttcttcacagagatcttaaggatggatccaagaaacgcagtggccaacaacaacgctgccgtgtgtctgctctacctgggcaagctcaaggactccctgcggcagctggaggccatggtccagcaggaccccaggcactacctgcacgagagcgtgctcttcaacctgaccaccatgtacgagctggagtcctcacggagcatgcagaagaaacaggccctgctggaggctgtcgccggcaaggagggggacagcttcaacacacagtgcctcaagctggcctagctgcctccaacacactacgtcagaaggacccgggtctttgaaactgtgtcttgaagctaatgtattaatgtgacatggaggaactcaataaaactcctgcttcactggtgaaaaa

SEQ ID NO: 668 - protein, 379 aa, Homo sapien
MLRFLGEKAAAKRQVLNADSVEQSFVGLKQLISCRNWRAAVDLCGRLLTAHGQGYGKSGLLTSHTTDSLQLWFVRLALLVKLGLFQNAEMEFEPVGNLDQPDLYYEYYPHVYPGRRGSMVPFSMRILHADLQQYLGNPQESLDRLHKVKTVCSKILANLEQGLAEDGGMSSVTQEGRQASIRLWRSRLGRVMYSMANCLLLMKDYVLAVEAYHSVIKYYPEQEPQLLSGIGRISLQIGDIKTAEKYFQDVEKVTQKLDGLQGKIMVLMNSAFLHLGQNNFAEAHRFFTEILRMDPRNAVANNNAAVCLLYLGKLKDSLRQLEAMVQQDPRHYLHESVLFNLTTMYELESSRSMQKKQALLEAVAGKEGDSFNTQCLKLA

SEQ ID NO: 669 - DNA, 1278 bp, Homo sapien
aatggaggaagactggacctactgattcaacttggagatgagcgggtctgtcctcttcacggcgggagagaggtggagatgctttctgaccccgtcgaggtcatccctgtactgggccttacataatttctgctgtcggaaaaaatccactacacctaagaaaattactcccaatgttactttttgtgatgaaaatgcaaaggagcccgaaaatgcacttgacaagctcttctcttcagaacagcaggcttccatcttgcatgtgttgaatacagcatctactaaagaacttgaagctttccgattgcttcgtggaagaaggtccatcaatatcgtagagcacagagaaaactttgggccatttcagaatttagagagtttaatgaatgtgcccttgtttaagtataaaagtacagttcaagtttgtaactccatactttgtccaaagactggacgggaaaaaagaaagtcaccggaaaaccggttcctgagaaagctcctcaaaccagacatagaaagagaaagacttaagaattgcctgggctcaccttgatcgtaagttgacagtgctggactggcagcaaagtgaccgttggagtttaatgagaggaatatactcatcatcagtctatttagaagagatttcctcgatcatttcaaagatgcctaaagcagatttctatgttctggaaaaaacaggactatccattcagaactcatctctgtttccaatactgttacattttcatatcatggaagccatgctgtatgccttattaaataaaacttttgcccaggatgggcagcatcaggtgctgagcatgaatcgaaatgcagtggggaagcattttgaactgatgattggtgactcccggactagtggaaaagagctagtgaagcagtttctcttcgattctatactgaaggcggatcctcgggtgttcttcccatcagataaaatagttcactacagacagatgtttttatctactgaactacaaagagtagaagagctttatgattcattattacaagctattgccttctatgaattagcagtgtttgactctcagccttagaattctgaggttaacgtgctaaagtataattattagctctaacgtaacaccaactgttgtgaacatccatgttattggaaaagaacacattttcagtgtattttagatgtttaaattctgacttttggctattaaatggtttacacaataagccaagaccaaatcaataaacattttatgagaaaaaaaaaaaaaaaaa

SEQ ID NO: 670 - protein, 158 aa, Homo sapien
MRGIYSSSVYLEEISSIISKMPKADFYVLEKTGLSIQNSSLFPILLHFHIMEAMLYALLNKTFAQDGQHQVLSMNRNAVGKHFELMIGDSRTSGKELVKQFLFDSILKADPRVFFPSDKIVHYRQMFLSTELQRVEELYDSLLQAIAFYELAVFDSQP

SEQ ID NO: 671 - DNA, 2254 bp, Homo sapien
ccttccggtcgttaacgcccacgggctcgcgcggcgccgcctcctgggctcagttaccgcggacgccagtgccgggctccaggagacgcagggcgacgccacacgccggggtggccgactgggtcagcgcgggctgcgcctcctcgccatgggccccctctcggcgcggctgctaatgcagcgcgggcgccccaagagcgaccggctggggaagatccggagtctggacctgtcaggattggagctgctttccgagcacctggaccccaaactcctgtgccgcctgacgcagctgcaggagcttgacctgtctaacaaccacctggagacgctgccggacaacctgggcctgtcccacctgcgtgtcctccgctgcgccaacaaccagctgggggatgttactgccttgtgccagttccccaagctcgaggaactcagcctggagggcaaccccttcctgacggtcaatgacaacctgaaagtctcctttctcctgcccacgctccgtaaggtcaatggcaaggatgcgtcctcaacttactctcaggtggagaacctgaatcgggagctgaccagcagggtcacagctcactgggagaagttcatggccacactgggtcctgaagaggaggctgagaaggcccaggcggactttgtgaagtcggctgtcagggatgtccgctacgggcccgagtccctcagcgagttcacccagtggcgggtgcggatgatctctgaggagctggtggccgccagtaggacccaggtgcaaaaggctaacagcccagagaagcccccagaagctggagctgcccacaagcccagggccagactggcggccttgaaacggccagacgacgtcccactcagcctctctcccagcaagcgggcgtgtgcctccccgtcggcccaggtggagggcagccctgtggcaggctccgatggcagccagcctgctgtgaagctggagcccctgcacttcctgcagtgccacagcaagaacaacagcccccaggacctcgagacccagctgtgggcctgtgccttcgagccggcctgggaggagggggccacatcccagaccgtggccacgtgcggcggggaggctgtgtgcgtaattgattgccagacgggcatcgtgctccacaagtacaaggcacccggcgaggagttcttttctgtggcctggaccgctctgatggtggtcacacaggctggccacaagaagcgctggagtgtgctggcggctgcaggcctacggggcctggtccggctgctgcacgtgcgtgccggcttctgctgcggggtcatccgagcccacaagaaggccatcgccaccctgtgcttcagccccgcccacgagacccatctcttcacggcctcctatgacaagcggatcatcctctgggacatcggggtgcccaaccaggactacgaattccaggccagccagctgctcacactggacaccacctctatccccctgcgcctctgccctgtcgcctcctgcccggacgcccgcctgctggccggctgcgagggcggctgctgctgctgggacgtgcggctggaccagccccaaaagaggagggtgtgtgaagtggaattcgtcttctctgagggctccgaggcatctggacggagagtggatgggctggcatttgtgaatgaggacatcgtggcctccaaggggagcggcctgggcaccatctgcctgtggagctggaggcagacgtgggggggccggggcagccagtccacagtggcagtggtggtcctggcgcggctgcaatggtcgtccaccgagttggcctacttctcgctcagcgcctgccctgataaggggattgtgctctgtggggatgaggagggcaacgtgtggctctacgacgtcagcaacatcctgaagcagccacccctgctgccggcagccctgcaggcccccacacagatcctgaagtggccccagccctgggcccttggccaggtggtgaccaagaccatggtgaacacagtggtggccaatgcctccttcacctacctcaccgccctgacggactccaacatcgtagccatctgggggaggatgtagcctcacaccatcgcaaaggaccagggacacagctaactaacttattcagctttgggccgatgggggtggggggggtctttcagtgaatatttttattaaactctactgtggacaagaaaaaaaaaaaaaaaaaaaaaaaaaaaaaaaaaaaaaaaaaaaaaa

SEQ ID NO: 672 - protein, 696 aa, Homo sapien
LPVVNAHGLARRRLLGSVTADASAGLQETQGDATRRGGRLGQRGLRLLAMGPLSARLLMQRGRPKSDRLGKIRSLDLSGLELLSEHLDPKLLCRLTQLQELDLSNNHLETLPDNLGLSHLRVLRCANNQLGDVTALCQFPKLEELSLEGNPFLTVNDNLKVSFLLPTLRKVNGKDASSTYSQVENLNRELTSRVTAHWEKFMATLGPEEEAEKAQADFVKSAVRDVRYGPESLSEFTQWRVRMISEELVAASRTQVQKANSPEKPPEAGAAHKPRARLAALKRPDDVPLSLSPSKRACASPSAQVEGSPVAGSDGSQPAVKLEPLHFLQCHSKNNSPQDLETQLWACAFEPAWEEGATSQTVATCGGEAVCVIDCQTGIVLHKYKAPGEEFFSVAWTALMVVTQAGHKKRWSVLAAAGLRGLVRLLHVRAGFCCGVIRAHKKAIATLCFSPAHETHLFTASYDKRIILWDIGVPNQDYEFQASQLLTLDTTSIPLRLCPVASCPDARLLAGCEGGCCCWDVRLDQPQKRRVCEVEFVFSEGSEASGRRVDGLAFVNEDIVASKGSGLGTICLWSWRQTWGGRGSQSTVAVVVLARLQWSSTELAYFSLSACPDKGIVLCGDEEGNVWLYDVSNILKQPPLLPAALQAPTQILKWPQPWALGQVVTKTMVNTVVANASFTYLTALTDSNIVAIWGRM

SEQ ID NO: 673 - DNA, 4354 bp, Homo sapien
gaattcggggggcgagtaagccagcggcaggaccagcgggcgggggccacaacaaaagctggcaggctgacagaggcggcctcaggacggaccttctggctactgaccgttttgctgtggttttcccggattgtgtgtaggtgtgagatcaaccatgagttccgttgcagttttgacccaagagagttttgctgaacaccgaagtgggctggttccgcaacaaatcaaagttgccactctaaattcagaagaggagagcgaccctccaacctacaaggatgccttccctccacttcctgagaaagctgcttgcctggaaagtgcccaggaacccgctggagcctgggggaacaagatccgacccatcaaggcttctgtcatcactcaggtgttccatgtacccctggaggagagaaaatacaaggatatgaaccagtttggagaaggtgaacaagcaaaaatctgccttgagatcatgcagagaactggtgctcacttggagctgtctttggccaaagaccaaggcctctccatcatggtgtcaggaaagctggatgctgtcatgaaagctcggaaggacattgttgctagactgcagactcaggcctcagcaactgttgccattcccaaagaacaccatcgctttgttattggcaaaaatggagagaaactgcaagacttggagctaaaaactgcaaccaaaatccagatcccacgcccagatgaccccagcaatcagatcaagatcactggcaccaaagagggcatcgagaaagctcgccatgaagtcttactcatctctgccgagcaggacaaacgtgctgtggagaggctagaagtagaaaaggcattccaccccttcatcgctgggccgtataatagactggttggcgagatcatgcaggagacaggcacgcgcatcaacatccccccacccagcgtgaaccggacagagattgtcttcactggagagaaggaacagttggctcaggctgtggctcgcatcaagaagatttatgaggagaagaaaaagaagactacaaccattgcagtggaagtgaagaaatcccaacacaagtatgtcattgggcccaagggcaattcattgcaggagatccttgagagaactggagtttccgttgagatcccaccctcagacagcatctctgagactgtaatacttcgaggcgaacctgaaaagttaggtcaggcgttgactgaagtctatgccaaggccaatagcttcaccgtctcctctgtcgccgccccttcctggcttcaccgtttcatcattggcaagaaagggcagaacctggccaaaatcactcagcagatgccaaaggttcacatcgagttcacagagggcgaagacaagatcaccctggagggccctacagaggatgtcaatgtggcccaggaacagatagaaggcatggtcaaagatttgattaaccggatggactatgtggagatcaacatcgaccacaagttccacaggcacctcattgggaagagcggtgccaacataaacagaatcaaagaccagtacaaggtgtccgtgcgcatccctcctgacagtgagaagagcaatttgatccgcatcgagggggacccacagggcgtgcagcaggccaagcgagagctgctggagcttgcatctcgcatggaaaatgagcgtaccaaggatctaatcattgagcaaagatttcatcgcacaatcattgggcagaagggtgaacggatccgtgaaattcgtgacaaattcccagaggtcatcattaactttccagacccagcacaaaaaagtgacattgtccagctcagaggacctaagaatgaggtggaaaaatgcacaaaatacatgcagaagatggtggcagatctggtggaaaatagctattcaatttctgttccgatcttcaaacagtttcacaagaatatcattgggaaaggaggcgcaaacattaaaaagattcgtgaagaaagcaacaccaaaatcgaccttccagcagagaatagcaattcagagaccattatcatcacaggcaagcgagccaactgcgaagctgcccggagcaggattctgtctattcagaaagacctggccaacatagccgaggtagaggtctccatccctgccaagctgcacaactccctcattggcaccaagggccgtctgatccgctccatcatggaggagtgcggcggggtccacattcactttcccgtggaaggttcaggaagcgacaccgttgttatcaggggcccttcctcggatgtggagaaggccaagaagcagctcctgcatctggcggaggagaagcaaaccaagagtttcactgttgacatccgcgccaagccagaataccacaaattcctcatcggcaaggggggcggcaaaattcgcaaggtgcgcgacagcactggagcacgtgtcatcttccctgcggctgaggacaaggaccaggacctgatcaccatcattggaaaggaggacgccgtccgagaggcacagaaggagctggaggccttgatccaaaacctggataatgtggtggaagactccatgctggtggaccccaagcaccaccgccacttcgtcatccgcagaggccaggtcttgcgggagattgctgaagagtatggcggggtgatggtcagcttcccacgctctggcacacagagcgacaaagtcaccctcaagggcgccaaggactgtgtggaggcagccaagaaacgcattcaggagatcattgaggacctggaagctcaggtgacattagaatgtgctataccccagaaattccatcgatctgtcatgggccccaaaggttccagaatccagcagattactcgggatttcagtgttcaaattaaattcccagacagagaggagaacgcagttcacagtacagagccagttgtccaggagaatggggacgaagctggggaggggagagaggctaaagattgtgaccccggctctccaaggaggtgtgacatcatcatcatctctggccggaaagaaaagtgtgaggctgccaaggaagctctggaggcattggttcctgtcaccattgaagtagaggtgccctttgaccttcaccgttacgttattgggcagaaaggaagtgggatccgcaagatgatggatgagtttgaggtgaacatacatgtcccggcacctgagctgcagtctgacatcatcgccatcacgggcctcgctgcaaatttggaccgggccaaggctggactgctggagcgtgtgaaggagctacaggccgagcaggaggaccgggctttaaggagttttaagctgagtgtcactgtagaccccaaataccatcccaagattatcgggagaaagggggcagtaattacccaaatccggttggagcatgacgtgaacatccagtttcctgataaggacgatgggaaccagccccaggaccaaattaccatcacagggtacgaaaagaacacagaagctgccagggatgctatactgagaattgtgggtgaacttgagcagatggtttctgaggacgtcccgctggaccaccgcgttcacgcccgcatcattggtgcccgcggcaaagccattcgcaaaatcatggacgaattcaaggtggacattcgcttcccacagagcggagccccagaccccaactgcgtcactgtgacggggctcccagagaatgtggaggaagccatcgaccacatcctcaatctggaggaggaatacctagctgacgtggtggacagtgaggcgctgcaggtatacatgaaacccccagcacacgaagaggccaaggcaccttccagaggctttgtggtgcgggacgcaccctggaccgccagcagcagtgagaaggctcctgacatgagcagctctgaggaatttcccagctttggggctcaggtggctcccaagaccctcccttggggccccaaacgataatgatcaaaaagaacagaaccctctccagcctgctgacccgaacccaaccacacaatggtttgtctcaatctgacccagcggctggaccctccgtaaattgttgagcgctcttccccttcccgaggtccgcagggagcctagcgcctggctgtgtgtgcggccgctcctccaggcctggccgtgcccgctcaggacctgctccactgtttaacaataaaccaaggtcatgagcattcgagctaagataacagactccagctcctggtccacccggcatgtcagtcagcactctggccttcatcacgagagctccgcagccgtggctaggattccacttcctgtgtcatgacctcaggaaataaacgtccttgactttataaaagccccgaattc

SEQ ID NO: 674 - protein, 1268 aa, Homo sapien
MSSVAVLTQESFAEHRSGLVPQQIKVATLNSEEESDPPTYKDAFPPLPEKAACLESAQEPAGAWGNKIRPIKASVITQVFHVPLEERKYKDMNQFGEGEQAKICLEIMQRTGAHLELSLAKDQGLSIMVSGKLDAVMKARKDIVARLQTQASATVAIPKEHHRFVIGKNGEKLQDLELKTATKIQIPRPDDPSNQIKITGTKEGIEKARHEVLLISAEQDKRAVERLEVEKAFHPFIAGPYNRLVGEIMQETGTRINIPPPSVNRTEIVFTGEKEQLAQAVARIKKIYEEKKKKTTTIAVEVKKSQHKYVIGPKGNSLQEILERTGVSVEIPPSDSISETVILRGEPEKLGQALTEVYAKANSFTVSSVAAPSWLHRFIIGKKGQNLAKITQQMPKVHIEFTEGEDKITLEGPTEDVNVAQEQIEGMVKDLINRMDYVEINIDHKFHRHLIGKSGANINRIKDQYKVSVRIPPDSEKSNLIRIEGDPQGVQQAKRELLELASRMENERTKDLIIEQRFHRTIIGQKGERIREIRDKFPEVIINFPDPAQKSDIVQLRGPKNEVEKCTKYMQKMVADLVENSYSISVPIFKQFHKNIIGKGGANIKKIREESNTKIDLPAENSNSETIIITGKRANCEAARSRILSIQKDLANIAEVEVSIPAKLHNSLIGTKGRLIRSIMEECGGVHIHFPVEGSGSDTVVIRGPSSDVEKAKKQLLHLAEEKQTKSFTVDIRAKPEYHKFLIGKGGGKIRKVRDSTGARVIFPAAEDKDQDLITIIGKEDAVREAQKELEALIQNLDNVVEDSMLVDPKHHRHFVIRRGQVLREIAEEYGGVMVSFPRSGTQSDKVTLKGAKDCVEAAKKRIQEIIEDLEAQVTLECAIPQKFHRSVMGPKGSRIQQITRDFSVQIKFPDREENAVHSTEPVVQENGDEAGEGREAKDCDPGSPRRCDIIIISGRKEKCEAAKEALEALVPVTIEVEVPFDLHRYVIGQKGSGIRKMMDEFEVNIHVPAPELQSDIIAITGLAANLDRAKAGLLERVKELQAEQEDRALRSFKLSVTVDPKYHPKIIGRKGAVITQIRLEHDVNIQFPDKDDGNQPQDQITITGYEKNTEAARDAILRIVGELEQMVSEDVPLDHRVHARIIGARGKAIRKIMDEFKVDIRFPQSGAPDPNCVTVTGLPENVEEAIDHILNLEEEYLADVVDSEALQVYMKPPAHEEAKAPSRGFVVRDAPWTASSSEKAPDMSSSEEFPSFGAQVAPKTLPWGPKR

SEQ ID NO: 675 - DNA, 1172 bp, Homo sapien
aaaatggtggtgttcgggtatgaggctgggactaagccaagggattcaggtgtggtgccggtgggaactgaggaagcgcccaaggaaatgaaacacgatttccaaaatgaacttaatctttcatgagaaactgaggatagagatgtcaataagcagccactgtttccacctccccacctgaagagctaggagcgcccaagctttcggttctgagctcggactaagccatgtggattcaggtgtggatgacggtgggaactgaggaagcgcccaaggttttcaagatggcagcatctatgcatggtcagcccagtccttctctagaagatgcaaaactcagaagaccaatggtcatagaaatcatagaaaaaaattttgactatcttagaaaagaaatgacacaaaatatatatcaaatggcgacatttggaacaacagctggtttctctggaatattctcaaacttcctgttcagacgctgcttcaaggttaaacatgatgctttgaagacatatgcatcattggctacacttccatttttgtctactgttgttactgacaagctttttgtaattgatgctttgtattcagataatataagcaaggaaaactgtgttttcagaagctcactgattggcatagtttgtggtgttttctatcccagttctttggcttttactaaaaatggacgcctggcaaccaagtatcataccgttccactgccaccaaaaggaagggttttaatccattggatgacgctttgtcaaacacaaatgaaattaatggcgattcctctagtctttcagattatgtttggaatattaaatggtctataccattatgcagtatttgaagagacacttgagaaaactatacatgaagagtaaccaaaaaaatgaatggttgctaacttagcaaaatgaagtttctataaagaggactcaggcattgctgaaagagttaaaagtaactgtgaacaaataatttgttctgtgccttttgcctggtatatagcaaatactcaaaaagtattcaataattcaatcaataaatataagtttcatcttacacgtaagatacaggtcttatctcctgatggtgtgtccattttgcctggtatataacagataataaatatccagtgtcaataaatgtaacaataaaaaaaaaaa

SEQ ID NO: 676 - protein, 219 aa, Homo sapien
MWIQVWMTVGTEEAPKVFKMAASMHGQPSPSLEDAKLRRPMVIEIIEKNFDYLRKEMTQNIYQMATFGTTAGFSGIFSNFLFRRCFKVKHDALKTYASLATLPFLSTVVTDKLFVIDALYSDNISKENCVFRSSLIGIVCGVFYPSSLAFTKNGRLATKYHTVPLPPKGRVLIHWMTLCQTQMKLMAIPLVFQIMFGILNGLYHYAVFEETLEKTIHEE

SEQ ID NO: 677 - DNA, 1279 bp, Homo sapien
ggaaaagatggcggctgccgcacaatcccgggttgtccgggtcctgtcaatgtcacgttctgccattactgcaatagccacatctgtgtgtcacggcccaccctgtcgccagcttcatcatgccctcatgcctcatgggaaaggtggacgttcctcagtcagtgggattgtggccactgtgtttggagcaacaggattcctggggcgatatgttgtcaaccaccttggacgcatggggtcacaggtaatcataccctatcggtgtgataaatatgacatcatgcaccttcgtcccatgggtgacctgggccagcttctgtttctggaatgggacgcgagagataaagattctatccgacgagtagtacaacacagcaatgtggtcatcaatcttattggacgagactgggaaaccaaaaactttgattttgaggatgtttttgtgaagattccccaagcaattgctcaactgtccaaggaagctggagttgaaaaattcattcatgtttcacatctgaatgcgaatattaaaagctcttctagatatttgagaaataaggctgttggagagaaagtagtgagagatgcatttccggaagccattatcgtaaagccgtcggacatctttggaagagaggatagattccttaattcttttgcaagtatgcatcggtttggtcctataccccttggttccttgggctggaagacagttaaacaaccagtatatgtcgtagatgtatccaaaggaattgttaatgcagttaaggatcctgatgccaatgggaaaacctttgctttcgttgggccaaatcgatatctcctctttgacctggtgaagtacatctttgctgtggctcacagcaaaggggtacttcctcccgtaccccttgccaccttttgcctatcagtgggtagcaagagactttgaaataagcccatttgagtcctggacaacaagggataaagtggagcgtattcacatcacagacatgaccttgtctcacctgcccagcttagaagaccttggtattcaggcaacaccactggaactcaaggccattgaggtgctgcggcttcatcacacttactgctggctgtctgctgaaattgaggatgtgaagctggccaagaccgtcaacatttagtgcctcccgagcaactcttggttttggtgtcttttgggtcagcccgtgtggtttgagcacccagccaggtggtctctttagagaatcctgtacacagtgaataagatcccaccattaaaacatttgaggtt

SEQ ID NO: 678 - protein, 309 aa, Homo sapien
EKMAAAAQSRVVRVLSMSRSAITAIATSVCHGPPCRQLHHALMPHGKGGRSSVSGIVATVFGATGFLGRYVVNHLGRMGSQVIIPYRCDKYDIMHLRPMGDLGQLLFLEWDARDKDSIRRVVQHSNVVINLIGRDWETKNFDFEDVFVKIPQAIAQLSKEAGVEKFIHVSHLNANIKSSSRYLRNKAVGEKVVRDAFPEAIIVKPSDIFGREDRFLNSFASMHRFGPIPLGSLGWKTVKQPVYVVDVSKGIVNAVKDPDANGKTFAFVGPNRYLLFDLVKYIFAVAHSKGVLPPVPLATFCLSVGSKRL

SEQ ID NO: 679 - DNA, 1910 bp, Homo sapien
aggtttcggcgggggctgcacgtgcgcaggggtgtggaaacttaccggctgagccatggatacaccgttaaggcgcagccgacggctgggaggcctaaggcccgaatcccccgagagcctcacctcagtttcgcggacgagacgggcccttgtggagttcgagtcgaacccagaagaaacgagggagcccgggtctcctccgagtgtgcagcgggctggcctggggtcccccgaaaggccgccgaagacaagcccaggatcaccccgtctgcagcagggtgcaggcttggagtcaccccaagggcagccagagccaggcgcagcgtccccccagcgtcagcaagacctacacctggagtcgcctcaaagacagccagagtacagtcctgaatccccacgatgtcagccgaagccaagtgaggaggcaccaaagtgttctcaggaccagggagtactggcctcggagttggcccagaataaggaggagctgaccccgggggccccccagcatcagctaccgccggtcccaggatcaccagagccttaccccggtcagcaagctcccggtccggagccctctcagccactactggagctgacacccagggcacctggctccccccggggtcagcatgagccgagcaagccacctccagctggggagacggtgacaggcggcttcggggcaaagaagcgaaaaggttcttcatcccaggccccagcgtccaagaagttgaataaagaggagcttcctgtaatcccgaaggggaagcccaaatcggggcgagtgtggaaggaccgctccaagaaaagattctcccagatgcttcaggacaagcccctgcgcacatcgtggcagcggaagatgaaggaacgacaggagaggaagctggccaaggactttgcccgtcacctggaggaggagaaggagaggcgccgccaggagaagaaacagcgccgggctgagaacctgaaacgccgcctggagaatgagcggaaggcagaggtcgtccaagtgatccgaaaccccgccaagctcaagcgggcaaagaagaagcagctgcgctccattgagaagcgggacaccctggccctgctgcagaagcagccgccccagcagccggcagccaagatctgagctcaggacggcccgaggccttccatggccaacgaccatgtcagacacagcacctcaggccgctgctcagatgcctctgctggagctggcactccaaacccatggctccagaacggggacccccaccccgaccggggctcctcggcctttgaaggcttccaggcaggtctgtgtgggacagaagcccagagggggcctgggacctggcagagatgggggcgggaagagattcagctcccatccctccttcctctccttctccaagtgccttcaaaccaagaactgtacattcttctggttcctcagtgagctggtgactggcaggtgactccctcagcagtgtatgccctttctcagcatcctaggtccatcccaggcctggaggctgacagttgggaatccagcttcccccacaccttcccaaaggctgctctgagcacctccacaccccactgcctctgtccccagcaaactgaatccggttcctctccacttttcaatactgaaagattaaaatggggaggttgcagggagcagagcttttccctagcacccactttcccaaaccagtctctgcagaagccccagagaatctaactcatgcctgtccagtctacagcaaaaatatttattgagtgcctgttgcatacaggcacaatcctaggcaccggcaaatacagacaatagaccaaagtccctgccctcgaggagctttcattctgatggagagaaaacataataaacaagcaaaatgcaaaaaaaaaaaaaaaaa

SEQ ID NO: 680 - protein, 360 aa, Homo sapien
MDTPLRRSRRLGGLRPESPESLTSVSRTRRALVEFESNPEETREPGSPPSVQRAGLGSPERPPKTSPGSPRLQQGAGLESPQGQPEPGAASPQRQQDLHLESPQRQPEYSPESPRCQPKPSEEAPKCSQDQGVLASELAQNKEELTPGAPQHQLPPVPGSPEPYPGQQAPGPEPSQPLLELTPRAPGSPRGQHEPSKPPPAGETVTGGFGAKKRKGSSSQAPASKKLNKEELPVIPKGKPKSGRVWKDRSKKRFSQMLQDKPLRTSWQRKMKERQERKLAKDFARHLEEEKERRRQEKKQRRAENLKRRLENERKAEVVQVIRNPAKLKRAKKKQLRSIEKRDTLALLQKQPPQQPAAKI

SEQ ID NO: 681 - DNA, 2010 bp, Homo sapien
gtcgactaccagaaaatactttcaacataaatgaactctccaacttattaaacttttatatagatagaggaagacagctctttcgggataaccacctgatacctgcagaaacccccagtcctgttattttcagtgattttccatttatctttaattcgctatccaaaattaaattattgcaagctgattcacatataaagatgcagatgtcagaaaagaaagcatacatgcttatgcatgaaacaattctgcaaaaaaaggatgaatttcctccatcacccagatttatacttagagtcagacgaagtcgcctggttaaagatgctctgcgtcaattaagtcaagctgaagctactgacttctgcaaagtattagtggttgaatttattaatgaaatttgtcctgagtctggaggggttagttcagagttcttccactgtatgtttgaagagatgaccaagccagaatatggaatgttcatgtatcctgaaatgtgttcctgcatgtggtttcctgccaagcctaaacctgagaagaaaagatatttcctctttggaatgctgtgtggactctccttattcaatttaaatgttgctaaccttcctttcccactggctctgtataaaaaacttctggaccaaaagccatcattggaagatttaaaagaactcagtcctcggttggggaagagtttgcaagaagttctagatgatgctgctgatgacattggagatgcgctctgcatacgcttttctatacactgggaccaaaatgatgttgacttaattccaaatgggatctccatacctgtggaccaaaccaacaagagagactatgtttctaagtatattgattacattttcaacgtctctgtaaaagcagtttatgaggaatttcagagaggattttatagagtctgtgagaaggagatacttagacatttctaccctgaagaactaatgacagcaatcattggaaatactgattatgactggaaacagtttgaacagaattcaaagtatgagcaaggataccaaaaatcacatcctactatacagttgttttggaaggctttccacaagctaaccttggatgaaaagaaaaaattcctctttttccttacaggacgtgataggctgcatgcaagaggcatacagaaaatggaaatagtatttcgctgtcctgaaactttcagtgaaagagatcacccaacatcaataacttgtcataatattctctccctccctaagtattctacaatggaaagaatggaggaagcactccaagtagccatcaacaacaacagaggatttgtctcacccatgctcacacagtcataatcacctctgagagactcagggtgggctttctcacacttggatccttctgttcttccttacacctaaataatacaagagattaatgaatagtggttagaagtagttgagggagagattgggggaatggggagatgatgatgatggtcaaagggtgcaaaatctcacacaagactgaggcaggagaatagggtacagagatagggatctaaggatgacttggacacactccctggcactgaagagtctgaacactggcctgtgattggtccattccaggaccttcatttgcataaggtatcaaaccacatcagcctctgattggccatgggccagacctgcactctggccaatgattggttcattccaggacattcatttgcataaggagtcaaaccacaccagtcttggattggctgtgagccaattcacctcagtctctaattggctgtgagtcagtctttcatttacatagggtgtaaccatcaagaaacctctacagggtacttaagccccagaagattttgctaccagggctcttgagccacttgctctagcccactcccaccctgtggaatgtactttcacttttgctgcttcactgccttgtgctccaataaatccactccttcaccacccaaaaaaaaaaaaaaaaaaaaaaaaaaaaaaaaaa

SEQ ID NO: 682 - protein, 379 aa, Homo sapien
MQMSEKKAYMLMHETILQKKDEFPPSPRFILRVRRSRLVKDALRQLSQAEATDFCKVLVVEFINEICPESGGVSSEFFHCMFEEMTKPEYGMFMYPEMCSCMWFPAKPKPEKKRYFLFGMLCGLSLFNLNVANLPFPLALYKKLLDQKPSLEDLKELSPRLGKSLQEVLDDAADDIGDALCIRFSIHWDQNDVDLIPNGISIPVDQTNKRDYVSKYIDYIFNVSVKAVYEEFQRGFYRVCEKEILRHFYPEELMTAIIGNTDYDWKQFEQNSKYEQGYQKSHPTIQLFWKAFHKLTLDEKKKFLFFLTGRDRLHARGIQKMEIVFRCPETFSERDHPTSITCHNILSLPKYSTMERMEEALQVAINNNRGFVSPMLTQS

SEQ ID NO: 683 - DNA, 490 bp, Homo sapien
tcgaattcctaatttttgtgggactccttaagacccacaagtgacttctgtctacactacagatgaactgaattgatcatctaaaatacgtttatagcgttcattgtgccagttgctcatggttctgctaattggcccaggactagttgtgatctgcagactgaagccagagtaagtaagagaattcaaggcactaagacaaccaggaacagttttaccaaggcaagtggaagctgctaggctcagtggttgcatgcctatagatggggtaaatcatcctggtgcaaatatggtattcacaccataaatgtgtagtgcaagtttcctctgtggccaatcacagggctgcaagctgaagccccagtttagcttattctccatacataacttcaaggggactttctggtgaacttttccaagaagctccaagcacagatggttcaaatttgcagtttggctagactttgtgactggatgtacattaaattaa

SEQ ID NO: 684 - protein, 17 aa, Homo sapien
MVQICSLARLCDWMYIK

SEQ ID NO: 685 - DNA, 2743 bp, Homo sapien
ggggggtggctgggctgcgcttgggtccgtcgctgcttcggtgtccctgtcgggcttcccagcagcggcctagcgggaaaagtaaaagatgtctgaatatattcgggtaaccgaagatgagaacgatgagcccattgaaataccatcggaagacgatgggacggtgctgctctccacggttacagcccagtttccaggggcgtgtgggcttcgctacaggaatccagtgtctcagtgtatgagaggtgtccggctggtagaaggaattctgcatgccccagatgctggctggggaaatctggtgtatgttgtcaactatccaaaagataacaaaagaaaaatggatgagacagatgcttcatcagcagtgaaagtgaaaagagcagtccagaaaacatccgatttaatagtgttgggtctcccatggaaaacaaccgaacaggacctgaaagagtattttagtacctttggagaagttcttatggtgcaggtcaagaaagatcttaagactggtcattcaaaggggtttggctttgttcgttttacggaatatgaaacacaagtgaaagtaatgtcacagcgacatatgatagatggacgatggtgtgactgcaaacttcctaattctaagcaaagccaagatgagcctttgagaagcagaaaagtgtttgtggggcgctgtacagaggacatgactgaggatgagctgcgggagttcttctctcagtacggggatgtgatggatgtcttcatccccaagccattcagggcctttgcctttgttacatttgcagatgatcagattgcgcagtctctttgtggagaggacttgatcattaaaggaatcagcgttcatatatccaatgccgaacctaagcacaatagcaatagacagttagaaagaagtggaagatttggtggtaatccaggtggctttgggaatcagggtggatttggtaatagcagagggggtggagctggtttgggaaacaatcaaggtagtaatatgggtggtgggatgaactttggtgcgttcagcattaatccagccatgatggctgccgcccaggcagcactacagagcagttggggtatgatgggcatgttagccagccagcagaaccagtcaggcccatcgggtaataaccaaaaccaaggcaacatgcagagggagccaaaccaggccttcggttctggaaataactcttatagtggctctaattctggtgcagcaattggttggggatcagcatccaatgcagggtcgggcagtggttttaatggaggctttggctcaagcatggattctaagtcttctggctggggaatgtagacagtggggttgtggttggttggtatagaatggtgggaattcaaatttttctaaactcatggtaagtatattgtaaaatacatatgtactaagaattttcaaaattggtttgttcagtgtggagtatattcagcagtatttttgacatttttctttagaaaaaggaagagctaaaggaattttataagttctgttacatgaaaggttgaaatattgagtggttgaaagtgaactgctgtttgcctgattggtaaaccaacacactacaattgatatcaaaaggtttctcctgtaatattttatccctggacttgtcaagtgaattctttgcatgttcaaaacggaaaccattgattagaactacattctttaccccttgttttaatttgaaccccaccatatggatttttttccttaagaaaatctccttttaggagatcatggtgtcacagtgtttggttcttttgttttgttttttaacacttgtctcccctcatacacaaaagtacaatatgaagccttcatttaatctctgcagttcatctcatttcaaatgtttatggaagaagcacttcactgaaagtagtgctgtaaatattctgccataggaatactgtctacatgctttctcattcaagaattcgtcatcacgcatcacaggccgcgtctttgacggtgggtgtcccatttttatccgctactctttatttcatggagtcgtatcaacgctatgaacgcaaggctgtgatatggaaccagaaggctgtctgaacttttgaaaccttgtgtgggattgatggtggtgccgaggcatgaaaggctagtatgagcgagaaaaggagagagcgcgtgcagagacttggtggtgcataatggatattttttaacttggcgagatgtgtctctcaatcctgtggctttggtgagagagtgtgcagagagcaatgatagcaaataatgtacgaatgttttttgcattcaaaggacatccacatctgttggaagacttttaagtgagtttttgttcttagataacccacattagatgaatgtgttaagtgaaatgatacttgtactccccctacccctttgtcaactgctgtgaatgctgtatggtgtgtgttctcttctgttactgatatgtaagtgtggcaatgtgaactgaagctgatgggctgagaacatggactgagcttgtggtgtgctttgcaggaggacttgaagcagagttcaccagtgagctcaggtgtctcaaagaagggtggaagttctaatgtctgttagctacccataagaatgctgtttgctgcagttctgtgtcctgtgcttggatgctttttataagagttgtcattgttggaaattcttaaataagactgatttaaataataaaaaaaaaaaaaaaaaaaa

SEQ ID NO: 686 - protein, 414 aa, Homo sapien
MSEYIRVTEDENDEPIEIPSEDDGTVLLSTVTAQFPGACGLRYRNPVSQCMRGVRLVEGILHAPDAGWGNLVYVVNYPKDNKRKMDETDASSAVKVKRAVQKTSDLIVLGLPWKTTEQDLKEYFSTFGEVLMVQVKKDLKTGHSKGFGFVRFTEYETQVKVMSQRHMIDGRWCDCKLPNSKQSQDEPLRSRKVFVGRCTEDMTEDELREFFSQYGDVMDVFIPKPFRAFAFVTFADDQIAQSLCGEDLIIKGISVHISNAEPKHNSNRQLERSGRFGGNPGGFGNQGGFGNSRGGGAGLGNNQGSNMGGGMNFGAFSINPAMMAAAQAALQSSWGMMGMLASQQNQSGPSGNNQNQGNMQREPNQAFGSGNNSYSGSNSGAAIGWGSASNAGSGSGFNGGFGSSMDSKSSGWGM

SEQ ID NO: 687 - DNA, 2961 bp, Homo sapien
aagagatgatttctccatcctgaacgtgcagcgagcttgtcaggaagatcggaggtgccaagtagcagagaaagcatcccccagctctgacagggagacagcacatgtctaaggcccacaagccttggccctaccggaggagaagtcaattttcttctcgaaaatacctgaaaaaagaaatgaattccttccagcaacagccaccgccattcggcacagtgccaccacaaatgatgtttcctccaaactggcagggggcagagaaggacgctgctttcctcgccaaggacttcaactttctcactttgaacaatcagccaccaccaggaaacaggagccaaccaagggcaatggggcccgagaacaacctgtacagccagtacgagcagaaggtgcgcccctgcattgacctcatcgactccctgcgggctctgggtgtggagcaggacctggccctgccagccatcgccgtcatcggggaccagagctcgggcaagagctctgtgctggaggcactgtcaggagtcgcgcttcccagaggcagcggaatcgtaaccaggtgtccgctggtgctgaaactgaaaaagcagccctgtgaggcatgggccggaaggatcagctaccggaacaccgagctagagcttcaggaccctggccaggtggagaaagagatacacaaagcccagaacgtcatggccgggaatggccggggcatcagccatgagctcatcagcctggagatcacctcccctgaggttccagacctgaccatcattgaccttcccggcatcaccagggtggctgtggacaaccagccccgagacatcggactgcagatcaaggctctcatcaagaagtacatccagaggcagcagacgatcaacttggtggtggttccctgtaacgtggacattgccaccacggaggcgctgagcatggcccatgaggtggacccggaaggggacaggaccatcggtatcctgaccaaaccagatctaatggacaggggcactgagaaaagcgtcatgaatgtggtgcggaacctcacgtaccccctcaagaagggctacatgattgtgaagtgccggggccagcaggagatcacaaacaggctgagcttggcagaggcaaccaagaaagaaattacattctttcaaacacatccatatttcagagttctcctggaggaggggtcagccacggttccccgactggcagaaagacttaccactgaactcatcatgcatatccaaaaatcgctcccgttgttagaaggacaaataagggagagccaccagaaggcgaccgaggagctgcggcgttgcggggctgacatccccagccaggaggccgacaagatgttctttctaattgagaaaatcaagatgtttaatcaggacatcgaaaagttagtagaaggagaagaagttgtaagggagaatgagacccgtttatacaacaaaatcagagaggattttaaaaactgggtaggcatacttgcaactaatacccaaaaagttaaaaatattatccacgaagaagttgaaaaatatgaaaagcagtatcgaggcaaggagcttctgggatttgtcaactacaagacatttgagatcatcgtgcatcagtacatccagcagctggtggagcccgcccttagcatgctccagaaagccatggaaattatccagcaagctttcattaacgtggccaaaaaacattttggcgaatttttcaaccttaaccaaactgttcagagcacgattgaagacataaaagtgaaacacacagcaaaggcagaaaacatgatccaacttcagttcagaatggagcagatggttttttgtcaagatcagatttacagtgttgttctgaagaaagtccgagaagagatttttaaccctctggggacgccttcacagaatatgaagttgaactctcattttcccagtaatgagtcttcggtttcctcctttactgaaataggcatccacctgaatgcctacttcttggaaaccagcaaacgtctcgccaaccagatcccatttataattcagtattttatgctccgagagaatggtgactccttgcagaaagccatgatgcagatactacaggaaaaaaatcgctattcctggctgcttcaagagcagagtgagaccgctaccaagagaagaatccttaaggagagaatttaccggctcactcaggcgcgacacgcactctgtcaattctccagcaaagagatccactgaagggcggcgatgcctgtggttgttttcttgtgcgtactcattcattctaaggggagtcggtgcaggatgccgcttctgctttggggccaaactcttctgtcactatcagtgtccatctctactgtactccctcagcatcagagcatgcatcaggggtccacacaggctcagctctctccaccacccagctcttccctgaccttcacgaagggatggctctccagtccttgggtcccgtagcacacagttacagtgtcctaagatactgctatcattcttcgctaatttgtatttgtattcccttccccctacaagattatgagaccccagagggggaaggtctgggtcaaattcttcttttgtatgtccagtctcctgcacagcacctgcagcattgtaactgcttaataaatgacatctcactgaacgaatgagtgctgtgtaagtgatggagatacctgaggctattgctcaagcccaggccttggacatttagtgactgttagccggtccctttcagatccagtggccatgccccctgcttcccatggttcactgtcattgtgtttcccagcctctccactcccccgccagaaaggagcctgagtgattctcttttcttcttgtttccctgattatgatgagcttccattgttctgttaagtcttgaagaggaatttaataaagcaaagaaactttttaaaaacgt

SEQ ID NO: 688 - protein, 715 aa, Homo sapien
MSKAHKPWPYRRRSQFSSRKYLKKEMNSFQQQPPPFGTVPPQMMFPPNWQGAEKDAAFLAKDFNFLTLNNQPPPGNRSQPRAMGPENNLYSQYEQKVRPCIDLIDSLRALGVEQDLALPAIAVIGDQSSGKSSVLEALSGVALPRGSGIVTRCPLVLKLKKQPCEAWAGRISYRNTELELQDPGQVEKEIHKAQNVMAGNGRGISHELISLEITSPEVPDLTIIDLPGITRVAVDNQPRDIGLQIKALIKKYIQRQQTINLVVVPCNVDIATTEALSMAHEVDPEGDRTIGILTKPDLMDRGTEKSVMNVVRNLTYPLKKGYMIVKCRGQQEITNRLSLAEATKKEITFFQTHPYFRVLLEEGSATVPRLAERLTTELIMHIQKSLPLLEGQIRESHQKATEELRRCGADIPSQEADKMFFLIEKIKMFNQDIEKLVEGEEVVRENETRLYNKIREDFKNWVGILATNTQKVKNIIHEEVEKYEKQYRGKELLGFVNYKTFEIIVHQYIQQLVEPALSMLQKAMEIIQQAFINVAKKHFGEFFNLNQTVQSTIEDIKVKHTAKAENMIQLQFRMEQMVFCQDQIYSVVLKKVREEIFNPLGTPSQNMKLNSHFPSNESSVSSFTEIGIHLNAYFLETSKRLANQIPFIIQYFMLRENGDSLQKAMMQILQEKNRYSWLLQEQSETATKRRILKERIYRLTQARHALCQFSSKEIH

SEQ ID NO: 689 - DNA, 1757 bp, Homo sapien
cgagcactaagtcctctgagttccgcagcgcagcaccggaagcggccgagcgcgctcagcccggcgacccctgcgggctccagacccctgcgccgctgcgccccgggtttcgccgcaaccaagacccagcgagtgcagcggcggccgctgaggaggttcgaaaacatggccaaaagaaatgccgagaaggaactgacagataggaattgggatcaagaagatgaagctgaagaggtgggaacattctccatggccagtgaggaagtcttgaagaatagagccataaagaaagcaaagcgcagaaatgttggatttgaatctgacactggaggagcctttaaaggttttaaaggtttggtggtaccttctggaggaggacgcttttctggatttggtagtggcgctggagggaagcctttggaaggactgtcgaatggaaacaacataaccagtgcccctcccttcgccagtgcaaaggcagcggcagatcccaaggtagcctttggttctcttgctgcaaatggccctaccaccttggttgataaagtttcaaatcccaaaactaatggggacagtcagcagccctcctcctctggccttgcttccagtaaagcttgtgtcggaaatgcctatcacaagcagttggccgccttgaactgctccgtgcgggattggatagtgaagcacgtgaatacaaaccccctctgtgatctgacacctatctttaaagactatgagaaatatttagcaaacattgaacagcaacacgggaacagtggcaggaattctgaaagtgaatctaacaaagtggcagctgaaacacagtctccttccctttttggctcaacaaaattacagcaagagtcaagctttttgtttcatggcaacaaaactgaagatacacctgacaagaagatggaggtggcatctgaaaagaaaacggacccatcatcactaggagcgacaagtgcctcatttaatttcggcaagaaagttgatagctctgttttgggctcattaagctctgtccccctgactggattttctttctcccctggaaactccagtttatttggcaaagatactacccagagtaaaccagtctcttcaccatttcccactaaaccattggagggccaagcagaaggtgacagtggtgaatgcaaaggtggagatgaagaagagaatgatgagccacccaaagtagtagttaccgaagtaaaagaagaagatgctttttactccaaaaagtgtaaactgttttacaagaaggacaatgagtttaaagagaaaggcataggtactctgcatttaaaacctacagcaaatcagaagacacagcttttggtgcgggcagacaccaatttaggcaacatattgctgaacgttctgattccacccaatatgccatgtacgcgaacagggaagaataacgttcttatcgtctgtgttccaaatccaccaattgacgagaagaatgccaccatgccagtcaccatgttgattcgggtaaaaaccagcgaggatgcagacgagttgcacaaaattttactggagaaaaaggatgcctgaacacgcaaagtcggctgcagaattattgccaagttgctgctgcttccaccgccccttaaagttagtcagtttttcttctcttctttgacattctaagaacttatagataacttaaaacttttgtgaggaagattaatgtggccaataaaacctttaaatgttaagtgtcaaaaaaaaaaaaaaaa

SEQ ID NO: 690 - protein, 468 aa, Homo sapien [sequence omitted]

SEQ ID NO: 691 - DNA, 1607 bp, Homo sapien
aagctttcctctttgcattttggcatttgaaaactccgaagagcggtttttgttttttatttaaagaagatgatacatatgtgtacccgattcaaaactagagaatagaatttaaaacataattttcaaagtcttcaaatatgcctaaaggtaacaatgtcatcttttaattgccaatttctctaccactttcaaaaaattacttccaaggatttaatgagctccttcctttcaacagaaaatggactattttcctttcagatttactatatgctgtcactccagctttataaccgcatgtgcatacacaaacatttctttctctcttgcaggtggcacaaaccaggaaggggaaatctgtggtttaaattctttatgcctcatcctctgagtgctgaaggcttgctgtaggctgtatgctgttaatgctaatcgtgataggggtttttgcctccaactgactcctacatattagcattaacagtgtatgatgcctgttactagcattcacatggaacaaattgctgccgtgggaggatgacaaagaagcatgagtcaccctgctggataaacttagacttcaggctttatcatttttcaatctgttaatcataatctggtcactgggatgttcaaccttaaactaagttttgaaagtaaggttatttaaaagatttatcagtagtatcctaaatgcaaacattttcatttaaatgtcaagcccatgtttgtttttatcattaacagaaaatatattcatgtcattcttaattgcaggttttggcttgttcattataatgttcataaacacctttgattcaactgttagaaatgtgggctaaacacaaatttctataatatttttgtagttaaaaattagaaggactactaacctccagttatatcatggattgtctggcaacgttttttaaaagatttagaaactggtactttcccccaggtaacgattttctgttcaggcaacttcagtttaaaattaatacttttatttgactcttaaagggaaactgaaaggctatgaagctgaatttttttaatgaaatatttttaacagttagcagggtaaataacatctgacagctaatgagatattttttccatacaagataaaaagatttaatcaaaaaatttcatatttgaaatgaagtcccaaatctaggttcaagttcaatagcttagccacataatacggttgtgcgagcagagaatctacctttccacttctaagcctgtttcttcctccatatggggataatactttacaaggttgttgtgaggcttagatgagatagagaattattccataagataatcaagtgctacattaatgttatagttagattaatccaagaactagtcaccctactttattagagaagagaaaagctaatgatttgatttgcagaatatttaaggtttggatttctatgcagtttttctaaataaccatcacttacaaatatgtaaccaaacgtaattgttagtatatttaatgtaaacttgttttaacaactcttctcaacattttgtccaggttattcactgtaaccaaataaatctcatgagtctttagttgatttaaaaaa

SEQ ID NO: 692 - protein, 64 aa, Homo sapien
MSSFLSTENGLFSFQIYYMLSLQLYNRMCIHKHFFLSCRWHKPGRGNLWFKFFMPHPLSAEGLL

SEQ ID NO: 693 - DNA, 661 bp, Homo sapien
ggcactttttaaaaatgtttatatgaggaaacaaagaagacttgctgtgatccagcgacatgcccagtgagtcgaagagaagaaactggaattaagctattctgtgtgccacttaggtcaggccctccactacatggtcctgcttctcttgcatgagttagctactcatatcatgagagcatccctttcttaattttctgcgctagtggagcagagccatgtatgtgctatggcccatatgttgaaacttgtttatctacagctagccagatggtctgtaacagcacacaaagaagccatttggaaactttcagagggtcagcacgttttgaaaacaactcagagtaatgcatattgtgatgtcattgcttactttaagcttacagtgaggaatatcttgttaggtactgaatgtgaaacatgcagactttgagaaccaactcagaggtcctagcccccagagacagaaatttatttaattggatcaccctttagacttgttttgtctacatgttctctgaaaaaggaatataatgtcttaatttaaaatactttgttttttaagttgctgctgggttaaatacatttttttttaaagaaaacctgcttatgcagtacatgttaacagatatgatgtggtcatcaataaaaatgtaaaata

SEQ ID NO: 694 - protein, 22 aa, Homo sapien
ALFKNVYMRKQRRLAVIQRHAQ

SEQ ID NO: 695 - DNA, 1172 bp, Homo sapien
gagacattcctcaattgcttagacatattctgagcctacagcagaggaacctccagtctcagcaccatgaatcaaactgcgattctgatttgctgccttatctttctgactctaagtggcattcaaggagtacctctctctagaaccgtacgctgtacctgcatcagcattagtaatcaacctgttaatccaaggtctttagaaaaacttgaaattattcctgcaagccaattttgtccacgtgttgagatcattgctacaatgaaaaagaagggtgagaagagatgtctgaatccagaatcgaaggccatcaagaatttactgaaagcagttagcaaggaaatgtctaaaagatctccttaaaaccagaggggagcaaaatcgatgcagtgcttccaaggatggaccacacagaggctgcctctcccatcacttccctacatggagtatatgtcaagccataattgttcttagtttgcagttacactaaaaggtgaccaatgatggtcaccaaatcagctgctactactcctgtaggaaggttaatgttcatcatcctaagctattcagtaataactctaccctggcactataatgtaagctctactgaggtgctatgttcttagtggatgttctgaccctgcttcaaatatttccctcacctttcccatcttccaagggtactaaggaatctttctgctttggggtttatcagaattctcagaatctcaaataactaaaaggtatgcaatcaaatctgctttttaaagaatgctctttacttcatggacttccactgccatcctcccaaggggcccaaattctttcagtggctacctacatacaattccaaacacatacaggaaggtagaaatatctgaaaatgtatgtgtaagtattcttatttaatgaaagactgtacaaagtataagtcttagatgtatatatttcctatattgttttcagtgtacatggaataacatgtaattaagtactatgtatcaatgagtaacaggaaaattttaaaaatacagatagatatatgctctgcatgttacataagataaatgtgctgaatggttttcaaataaaaatgaggtactctcctggaaatattaagaaagactatctaaatgttgaaagatcaaaaggttaataaagtaattataact

SEQ ID NO: 696 - protein, 98 aa, Homo sapien
MNQTAILICCLIFLTLSGIQGVPLSRTVRCTCISISNQPVNPRSLEKLEIIPASQFCPRVEIIATMKKKGEKRCLNPESKAIKNLLKAVSKEMSKRSP

SEQ ID NO: 697 - DNA, 2953 bp, Homo sapien
atgattgcaacagtggatttaaaagtcaatgaatatgagaaaaaccaaaaatggcttgagatcctaaataagattgaaaacaaaacatacacgaagctcaaaaatggacatgtgtttaggaagcaggcactgatgagtgaagaaaggactctgttatatgatggccttgtttactggaaaactgctacaggtcgtttcaaagatatcctagctctacttctaactgatgtgctgctctttttacaagaaaaagaccagaaatacatctttgcagccgttgatcagaagccatcagttatttcccttcaaaagcttattgctagagaagttgctaatgaggagagaggaatgtttctgatcagtgcttcatctgctggtcctgagatgtatgaaattcacaccaattccaaggaggaacgcaataactggatgagacggatccagcaggctgtagaaagttgtcctgaagaaaaagggggaaggacaagtgaatctgatgaagacaagaggaaagctgaagccagagtggccaaaattcagcaatgtcaagaaatactcactaaccaagaccaacaaatttgtgcgtatttggaggagaagctgcatatctatgctgaacttggagaactgagcggatttgaggacgtccatctagagccccacctccttattaaacctgacccaggcgagcctccccaggcagcctcattactggcagcagcactgaaagaagcattagtcacaggagggagagaaggaagaggctgttcggatgtggatcccgggatccagggtgtggtaaccgacttggccgtctctgatgcaggggagaaggtggaatgtagaaattttccaggttcttcacaatcagagattatacaagccatacagaatttaacccgtctcttatacagccttcaggccgccttgaccattcaggacagccacattgagatccacaggctggttctccagcagcaggagggcctgtctctcggccactctatcctccgaggcggccccttgcaggaccagaagtctcgcgacgcggacaggcagcatgaggagctggccaatgtgcaccagcttcagcaccagctccagcaggggcagcggcgctggctgcgcaggtgtgagcagcagcagcgggcgcaggcgaccagggagagctggctgcaggagcgggagcgggagtgccagtcgcaggaggagctgctgctgcggagccggggcgagctggacctccagctccaggagtaccagcacagcctggagcggctgagggagggccagcgcctggtggagagggagcaggcgaggatgcgggcccagcagagcctgctgggccactggaagcacggccggcagaggagcctgtccgcggtgctccttccgggtggccccgaggtaatggaacttaatcgatctgagagtttatgtcatgaaaactcattcttcatcaatgaagctttagtacaaatgtcatttaacactttcaacaaactgaatccatcagttatccatcaggatgccacttaccctacaactcaatctcattctgacttggtgaggactagtgaacatcaagtagacctcaaggtggacccttctcagccttcgaatgtcagtcacaaactgtggacagccgctggttccggccatcagatacttcctttccatgaaagcagcaaggattcttgtaaaaatggctccagtatgacaaagtgcagttgtacgttgacatctcccccgggactgtggactggaaccacatctactttgaaggatttggacacctcccacactgagtccccaaccccccatgactcaaattcacaccgccctcaactgcaggcgtttataacagaagcaaagctaaatctaccgacaaggacaatgaccagacaagatggggaaactggagatggagccaaagaaaatattgtttacctctaattgtgttgtcatttttccaaacaaaacaaaacactggcacttttgggagaaactttttgtctccattccttatgtatgtgtgattgtctgtgtccaaattgctttaagaataatatttaatatttcctggaagctcatttttttggcatgagtctaattaaattattgaaagccaccctgtttgtataatctttaacttatcaaatctaatttcagatttctggaggagaaactaacttgaataagcaggactattttaaaagttgttttgacgctagagtaaaattccatgtcacattttctacccaatcatctggatttcaagattccttttaagatctcaatgaagcaatttggatttaaagagtggtattcacaaggggtgaactttcacagtcagggcagttgcctcagtgcccacataggcagaggaggatgtgggaaagggcttttctcagctagtttttgtgtgctcatttcttctgggagcattaaaagtggtgatctgttacagtcactattcaactgggcacgtgttgtgattggtcagtcactgagccagggatacagtccggacttgcttagtacctaagcctaatgctggtggggtttcaagacatggttcagcatcatcttttaacaaggcccagaggcccagagcccgcatcaagtcattttgatgtaaatagtgaactttgttagagccctcacttctatcaatcagctgtcctgtccctgccagcacctggagcaccaactaccactccctggaaagaacccttccctgcagttttttaaggacaaaactgcccactcctcattaagtttgctgcctggatacacttttccacaaaggaaaactggcatatcctgccttccgagtagtatgggtctctgtgtgagaaaccaggagatattttcatcttgttcggaaatacttgtatgtattttggtgtcaataaatatcttgtacctcattaaaaaaaaaaaaaaaaaa

SEQ ID NO: 698 - protein, 651 aa, Homo sapien
MIATVDLKVNEYEKNQKWLEILNKIENKTYTKLKNGHVFRKQALMSEERTLLYDGLVYWKTATGRFKDILALLLTDVLLFLQEKDQKYIFAAVDQKPSVISLQKLIAREVANEERGMFLISASSAGPEMYEIHTNSKEERNNWMRRIQQAVESCPEEKGGRTSESDEDKRKAEARVAKIQQCQEILTNQDQQICAYLEEKLHIYAELGELSGFEDVHLEPHLLIKPDPGEPPQAASLLAAALKEALVTGGREGRGCSDVDPGIQGVVTDLAVSDAGEKVECRNFPGSSQSEIIQAIQNLTRLLYSLQAALTIQDSHIEIHRLVLQQQEGLSLGHSILRGGPLQDQKSRDADRQHEELANVHQLQHQLQQGQRRWLRRCEQQQRAQATRESWLQERERECQSQEELLLRSRGELDLQLQEYQHSLERLREGQRLVEREQARMRAQQSLLGHWKHGRQRSLSAVLLPGGPEVMELNRSESLCHENSFFINEALVQMSFNTFNKLNPSVIHQDATYPTTQSHSDLVRTSEHQVDLKVDPSQPSNVSHKLWTAAGSGHQILPFHESSKDSCKNGSSMTKCSCTLTSPPGLWTGTTSTLKDLDTSHTESPTPHDSNSHRPQLQAFITEAKLNLPTRTMTRQDGETGDGAKENIVYL

SEQ ID NO: 699 - DNA, 2732 bp, Homo sapien
gcggcgctaggcctgggcacgctggcgctgtgcggggcggcgctgctctacctggcgcgctgcgcggccgagcccggggaccccagggcgatgtcgggccgcagcccgcctccccccgcgcccgcgcgcgccgccgccttcctggcagtgctggtggccagcgcgccccgcgccggccgagcgccgcagcgtgatccgcagcacgtggcttgcgcggcgcggggccccgggcgacgtgtgggcgcgctttgccgtgggcacggccggcctgggcgccgaggagcggcgcgccctggagcgggagcaggcgcggcacggggacctgctgctgctgcccgcgctgcgcgacgcctacgaaaacctcacggccaaggtgctggccatgctggcctggctggacgagcacgtggccttcgagttcgtgctcaaggcggacgacgactccttcgcgcggctggacgcgctgctggccgagctgcgcgcccgcgagcccgcgcgccgccgccgctctactggggcttcttctcgggccgcggccgcgtcaagccgggggggcgctggcgcgaggccgcctggcaactctgcgactactacctgccctacgcgctgggcggcggctacgtgctctcggccgacctggtgcactacctgcgcctcagccgcgactacctgcgcgcctggcacagcgaggacgtgtctctgggcgcctggctggcgccggtggacgtccagcgggagcacgacccgcgcttcgacaccgaataccggtcccgcggctgcagcaaccagtacctggtgacgcacaagcagagcctggaggacatgctggagaagcacgcgacgctggcgcgcgagggccgcctgtgcaagcgcgaggtgcagctgcgcctgtcctacgtgtacgactggtccgcgccgccctcgcagtgctgccagagaagggagggcatcccctgagccgccgcggcccggccctccgggacacctgcttcacccggcggcgccttggggcaggtgccgagcgggcgcactacgcccgggccccaaggcccccgtcccgcagccacgcttgtggtcgctgcgtcccggtctgcgtttgggagacccctgggggttgccggggcagcgcgccgtgtccaggtggaggtgcccgttcctggacctcagcgagcctgagccgggcccggccgcacgctgacccccgtgctgtccccgaccggctcacggggctgggctccgatcttccgtgtctcttatcagtggcgtttctcacgtctgcgtctcagatctaacgtggtttcacatcaatccgctttcatgggattttggtctctgtccagtgacttcgtggtaaatgtaactcagtgtttgcttgcgacttatttataaatattgtaagtttgtgtcgatgagtgtaagttggcagtgcgcacgtctcggtttttttacatgatttaaggaaagacttttatgtcagaacttggtgcctgtaccgtcaaccccgctgctgcccgtgtttaaacgcaggagaactttaaaactggccatctatcttttcagtgtacaagtcactgaacccattgtttctttctgaagagactttcctttcaaggcttcccatgggtccgcgccacacagggccggtgctgctttatttcagactctgccccaggttccaggaatccgaaccccggagtgctgacgcggttccccaacttccgccttaagaaaacaggaccagccggcaccaggcccgtctctcacgtactttaacacatccttgaaagcccctcgtttaatgagaaaagcgaacactgcggtccttgccaaagtaaaatgaagctgccccaggacaaggggttaccatgagctccctggagtccgacgcgggttttctctctgggggacctgggtggtccccgctgtggtctttgttgtcccactttgggaccgggtccagtctggggtctagtctcgagcatcagggtcaggctcggggcagggctgggttaggctccgggtcagtcttgccatgggtttgggagcaggtttgggttacttgcgtttgaaggcagcagtggtctcaggaggaagaaacgggggcgggagagagtggtgatctgtggtcagtgggtcagtgacctgcacggtgattctcccacctccaaaaggtaggggtgggactggaggcgtccctaggtcaggccgttgagttcgagctccgatgggccaccttgaatccaggactgaccgcccgtgtgtgcacagtttgttcttggacgaggactcgtgaggatcgagggctggggaccccggtgtgagcaggatggggccctgccctcccgtgggagttgtggactcgagcccaggggctgcccgtcacagcggtgtcccaggtccctgccatccgattttacctgggatgtcttctctggagtttggaattgcttgaggaaccctgcgtgtgcttggagaggccagagggcttgctgagaaccccatggacagtggagagcgggattcgaaccaagggctggactcccacacctctggcctgcgtcgcccagttctttgtggctctgaagaattggccgctgtggaaaagagcaaatgtccgagacccccaacaggaagagtctaaaaatccagtttgcaaccacttctgacctacaaaaaaatggaaatttagtgtttttcagcctaagacattaaatttcatatcagaacaagaa

SEQ ID NO: 700 - protein, 318 aa, Homo sapien
AALGLGTLALCGAALLYLARCAAEPGDPRAMSGRSPPPPAPARAAAFLAVLVASAPRAGRAPQRDPQHVACAARGPGRRVGALCRGHGRPGRRGAARPGAGAGAARGPAAAARAARRLRKPHGQGAGHAGLAGRARGLRVRAQGGRRLLRAAGRAAGRAARPRARAPPPLYWGFFSGRGRVKPGGRWREAAWQLCDYYLPYALGGGYVLSADLVHYLRLSRDYLRAWHSEDVSLGAWLAPVDVQREHDPRFDTEYRSRGCSNQYLVTHKQSLEDMLEKHATLAREGRLCKREVQLRLSYVYDWSAPPSQCCQRREGIP

SEQ ID NO: 701 - DNA, 2644 bp, Homo sapien
ccgaggccaagtcccgggcgctagcccacctcccacccgcctcttggctcctctcctctaggccgtcgctttcgggttctctcatcgcttcgtcgttcgccaatgtttgaggagaaggccagcagtccttcagggaagatgggaggcgaggagaagccgattggtgctggtgaagagaagcaaaaggaaggaggcaaaaagaagaacaaagaaggatctggagatggaggtcgagctgagttgaatccttggcctgaatatatttacacacgtcttgagatgtataatatactaaaagcagaacatgattccattctggcagaaaaggcagaaaaagatagcaagccaattaaagtcactttgcctgatggtaaacaggttgatgcggaatcttggaaaactacaccatatcaaattgcctgtggaattagtcaaggcctggccgacaacaccgttattgctaaagtaaataatgttgtgtgggacctggaccgccctctggaagaagattgtaccttggagcttctcaagtttgaggatgaggaagctcaggcagtgtattggcactctagtgctcacataatgggtgaaggcatggaaagagtctatggtggatgtttatgctacggtccgccaatagaaaatggattctattatgacatgtacctcgaagaagggggtgtgtctagcaatgatttctcttctctggaggctttgtgtaagaaaatcattaaagaaaaacaagcttttgaaagactggaagttaagaaagaaactttactggcaatgtttaagtacaacaagttcaaatgccggatattgaatgaaaaggtgaatactccaactaccacagtctatagatgtggccctttgatagatctctgccggggtcctcatgttagacacacgggcaaaattaaggctttaaaaatacacaaaaattcctccacgtactgggaaggcaaagcagatatggagactctccagagaatttatggcatttcattcccagatcctaaaatgttgaaagagtgggagaagttccaagaggaagctaaaaaccgagatcataggaaaattggcagggaccaagaactatatttctttcatgaactcagccctggaagttgcttttttctgccaaaaggagtctatatttataatgcacttattgaattcattaggagcgaatataggaaaagaggattccaggaggtagtcaccccaaacatcttcaacagccgactctggatgacctcgggccactggcagcactacagcgagaacatgttctcctttgaggtggagaaggagctgtttgccctgaaacccatgaactgcccaggacactcccttatgtttgatcatcggccaaggtcctggcgagaactgcctctgcggctagctgattttgggggtcttcataggaacgagctgtctggagcactcacaggactcacccgggtacgaagattccaacaggatgatgctcacatattctgtgccatggagcagattgaagatgaaataaaaggttgtttggattttctacgtacggtatatagcgtatttggattttcttttaaactaaacctttctactcgcccggaaaaattccttggagatatcgaagtatgggatcaagctgagaaacaacttgaaaacagtctgaatgaatttggtgaaaagtgggagttaaactctggagatggagctttctatggcccaaagattgacatacagattaaagatgcgattgggcggtaccaccagtgtgcaaccatccagctggatttccagttgcccatcagatttaatcttacttatgtaagccatgatggtgaggataagaaaaggccagtgattgttcatcgagccatcttgggatcagtggaaagaatgattgctatcctcacagaaaactatgggggcaaattggcccccttttggctgtcccctcgccaggtaatggtagttccagtgggaccaacctgtgatgaatatgcccaaaacgtacgacaacaattccacgatgccaaattcatggcagacattgatctggatccaggctgtacattgaataaaaagattcgaaatgcacagttagcacagtataacttcattttagttgttggtgaaaaagagaaaatcactggcactgttaatatccgcacaagagacaataaggtccacggggaacgcaccatttctgaaactatcgagcggctacagcagctcaaagagttccgcagcaaacaggcagaagaagaattttaatgaaaaaattacccagattggctccatggaaaaggaggaacagcgtttccgtaaaattgactttgtactcgaaaacgtcaatttatattgaacttggaggaggagtttggcaaagtctgaaataggtcaacctgcaggcgtaactatttttgacctagtcagtttttaaacaatgtgcatttgaaggagttaattaaaagagagccaataaaatgattttactcattcagtatctgagtactggaagtgaaacatgaggaatgctttagtgtaatgtgggagaacttttttgtaaatttaatgcaattgaaaaagttttcaaattcaattaagataactagaattggttatggtgtaacccgaattc

SEQ ID NO: 702 - protein, 712 aa, Homo sapien
MGGEEKPIGAGEEKQKEGGKKKNKEGSGDGGRAELNPWPEYIYTRLEMYNILKAEHDSILAEKAEKDSKPIKVTLPDGKQVDAESWKTTPYQIACGISQGLADNTVIAKVNNVVWDLDRPLEEDCTLELLKFEDEEAQAVYWHSSAHIMGEGMERVYGGCLCYGPPIENGFYYDMYLEEGGVSSNDFSSLEALCKKIIKEKQAFERLEVKKETLLAMFKYNKFKCRILNEKVNTPTTTVYRCGPLIDLCRGPHVRHTGKIKALKIHKNSSTYWEGKADMETLQRIYGISFPDPKMLKEWEKFQEEAKNRDHRKIGRDQELYFFHELSPGSCFFLPKGVYIYNALIEFIRSEYRKRGFQEVVTPNIFNSRLWMTSGHWQHYSENMFSFEVEKELFALKPMNCPGHSLMFDHRPRSWRELPLRLADFGGLHRNELSGALTGLTRVRRFQQDDAHIFCAMEQIEDEIKGCLDFLRTVYSVFGFSFKLNLSTRPEKFLGDIEVWDQAEKQLENSLNEFGEKWELNSGDGAFYGPKIDIQIKDAIGRYHQCATIQLDFQLPIRFNLTYVSHDGEDKKRPVIVHRAILGSVERMIAILTENYGGKLAPFWLSPRQVMVVPVGPTCDEYAQNVRQQFHDAKFMADIDLDPGCTLNKKIRNAQLAQYNFILVVGEKEKITGTVNIRTRDNKVHGERTISETIERLQQLKEFRSKQAEEEF

SEQ ID NO: 703 - DNA, 3346 bp, Homo sapien
acgtactccatgcgctacctgctgcccagcgtcgtgctcctgggcacggcgcccacctacgtgttggcctggggggtctggcggctgctctccgccttcctgcccgcccgcttctaccaagcgctggacgaccggctctactgcgtctaccagagcatggtgctcttcttcttcgagaattacaccggggtccagatattgctatatggagatttgccaaaaaataaagaaaatataatatatttagcaaatcatcaaagcacagttgactggattgttgctgacatcttggccatcaggcagaatgcgctaggacatgtgcgctacgtgctgaaagaagggttaaaatggctgccattgtatgggtgttactttgctcagcatggaggaatctatgtaaagcgcagtgccaaatttaacgagaaagagatgcgaaacaaggtgcagagctacgtggacgcaggaactccaatgtatcttgtgatttttccagaaggtacaaggtataatccagagcaaacaaaagtcctttcagctagtcaggcatttgctgcccaacgtggccttgcagtattaaaacatgtgctaacaccacgaataaaggcaactcacgttgcttttgattgcatgaagaattatttagatgcaatttatgatgttacggtggtttatgaagggaaagacgatggagggcagcgaagagagtcaccgaccatgacggaatttctctgcaaagaatgtccaaaaattcatattcacattgatcgtatcgacaaaaaagatgtcccagaagaacaagaacatatgagaagatggctgcatgaacgtttcgaaatcaaagataagatgcttatagaattttatgagtcaccagatccagaaagaagaaaaagatttcctgggaaaagtgttaattccaaattaagtatcaagaagactttaccatcaatgttgatcttaagtggtttgactgcaggcatgcttatgaccgatgctggaaggaagctgtatgtgaacacctggatatatggaaccctacttggctgcctgtgggttactattaaagcatagacaagtagctgtctccagacagtgggatgtgctacattgtctatttttggcggctgcacatgacatcaaattgtttcctgaatttattaaggagtgtaaataaagccttgttgattgaagattggataatagaatttgtgacgaaagctgatatgcaatggtcttgggcaaacatacctggttgtacaactttagcatcggggctgctggaagggtaaaagctaaatggagtttctcctgctctgtccatttcctatgaactaatgacaacttgagaaggctgggaggattgtgtattttgcaagtcagatggctgcatttttgagcattaatttgcagcgtatttcactttttctgttattttcaatttattacaacttgacagctccaagctcttattactaaagtatttagtatcttgcagctagttaatatttcatcttttgcttatttctacaagtcagtgaaataaattgtatttaggaagtgtcaggatgttcaaaggaaagggtaaaaagtgttcatggggaaaaagctctgtttagcacatgattttattgtattgcgttattagctgattttactcattttatatttgcaaaataaatttctaatatttattgaaattgcttaatttgcacaccctgtacacacagaaaatggtataaaatatgagaacgaagtttaaaattgtgactctgattcattatagcagaactttaaatttcccagctttttgaagatttaagctacgctattagtacttccctttgtctgtgccataagtgcttgaaaacgttaaggttttctgttttgttttgtttttttaatatcaaaagagtcggtgtgaaccttggttggaccccaagttcacaagatttttaaggtgatgagagcctgcagacattctgcctagatttactagcgtgtgccttttgcctgcttctctttgatttcacagaatattcattcagaagtcgcgtttctgtagtgtggtggattcccactgggctctggtccttcccttggatcccgtcagtggtgctgctcagcggcttgcacgcagacttgctaggaagaaatgcagagccagcctgtgctgcccactttcagagttgaactctttaagcccttgtgagtgggcttcaccagctactgcagaggcattttgcatttgtctgtgtcaagaagttcaccttctcaagccagtgaaatacagacttaatttgtcatgactgaacgaatttgtttatttcccattaggtttagtggagctacacattaatatgtatcgccttagagcaagagctgtgttccaggaaccagatcacgatttttagccatggaacaatatatcccatgggagaagacctttcagtgtgaactgttctatttttgtgttataatttaaacttcgatttcctcatagtcctttaagttgacatttctgcttactgctactggatttttgctgcagaaatgtatcagtggcccacattaaacataccagttggatcatgataagcaaaatgaaagaaataatgattaagggaaaattaagtgactgtgttacactgcttctcccatgccagagaataaactctttcaagcatcatctttgaagagtcgtgtggtgtgaattggtttgtgtacattagaatgtatgcacacatccatggacactcaggatatagttggcctaataatcggggcatgggtaaaacttatgaaaatttcctcatgctgaattgtaattttctcttacctgtaaagtaaaatttagatcaattccatgtctttgttaagtacagggatttaatatattttgaatataatgggtatgttctaaatttgaactttgagaggcaatactgttggaattatgtggattctaactcattttaacaaggtagcctgacctgcataagatcacttgaatgttaggtttcatagaactatactaatcttctcacaaaaggtctataaaatacagtcgttgaaaaaaattttgtatcaaaatgtttggaaaattagaagcttctccttaacctgtattgatactgacttgagttattttctaaaattaagagccgtatacctacctgtaagtcttttcacatatcatttaaacttttgtttgtattattactgatttacagcttagttattaatttttctttataagaatgccgtcgatgtgcatgcttttatgttttttagaaaagggtgtgtttggatgaaagtaaaaaaaaaaataaaatctttcactgtctct

SEQ ID NO: 704 - protein, 353 aa, Homo sapien
MRYLLPSVVLLGTAPTYVLAWGVWRLLSAFLPARFYQALDDRLYCVYQSMVLFFFENYTGVQILLYGDLPKNKENIIYLANHQSTVDWIVADILAIRQNALGHVRYVLKEGLKWLPLYGCYFAQHGGIYVKRSAKFNEKEMRNKVQSYVDAGTPMYLVIFPEGTRYNPEQTKVLSASQAFAAQRGLAVLKHVLTPRIKATHVAFDCMKNYLDAIYDVTVVYEGKDDGGQRRESPTMTEFLCKECPKIHIHIDRIDKKDVPEEQEHMRRWLHERFEIKDKMLIEFYESPDPERRKRFPGKSVNSKLSIKKTLPSMLILSGLTAGMLMTDAGRKLYVNTWIYGTLLGCLWVTIKA

SEQ ID NO: 705 - DNA, 809 bp, Homo sapien
agcggcgagggctggatcctgggccaaatatatgccaacaacgacaagctctccaagaggctgaagaaagtgtggaagccacagctgtttgagcgagagttctacagtgagatcctggacaagaagttcacagtgactgtgaccatgcggaccctggacctcatcgatgaggcttacgggctcgacttttacatcctcaagaccccgaaggaggacctgtgctccaagtttgggatggagctgaagcgagggatgctgctgcggcttgcccggcaggacccccagctgcaccccgaggaccccgagcggcgggcagccatctacgacaagtacaaggaatttgccatcccagaggaggaggcagagtgggtgggcctcacgctggaggaggccattgagaagcagagacttttggaggagaaggaccctgtacccctgttcaagatctatgtggcggagctgatccagcagctgcagcagcaggcactgtcagagccggcggtggtgcagaagacagccagtggccagtgaccacacagctcctccatgcctgaccaacaggcccagctttccctgccaggccctttgcactgaggacacagatcccggggagctgtgagggccaccggtgggcagtgggtggatcctggtttcgtgtgctgcccatgcaccttccagcccggggccagcttggcagggatccccaggaggcctgggccgcccagaggctcctctcaggctgggccccgacgtttgcggcagtgttccttgtcccgtggggccgggagcgagtaaagtctgggccaggc

SEQ ID NO: 706 - protein, 128 aa, Homo sapien
MRTLDLIDEAYGLDFYILKTPKEDLCSKFGMELKRGMLLRLARQDPQLHPEDPERRAAIYDKYKEFAIPEEEAEWVGLTLEEAIEKQRLLEEKDPVPLFKIYVAELIQQLQQQALSEPAVVQKTASGQ

SEQ ID NO: 707 - DNA, 1842 bp, Homo sapien
ccgctttgttgcctgaggtgggtggcggtggaagttaagggagtcaggggctatcgctcctcgagactcgcagtcgcggccactgcagtcacttcgccagttagcccttagggtaggagtcgcgccggcagcagccatgagcggcggcgtgtacgggggagatgaagttggagcccttgtttttgacattggatcctatactgtgagagctggttatgctggtgaggactgccccaaggtggattttcctacagctattggtatggtggtagaaagagatgacggaagcacattaatggaaatagatggcgataaaggcaaacaaggcggtcccacctactacatagatactaatgctctgcgtgttccgagggagaatatggaggccatttcacctctaaaaaatgggatggttgaagactgggatagtttccaagctattttggatcatacctacaaaatgcatgtcaaatcagaagccagtctccatcctgttctcatgtcagaggcaccgtggaatactagagcaaagagagagaaactgacagagttaatgtttgaacactacaacatccctgccttcttcctttgcaaaactgcagttttgacagcatttgctaatggtcgttctactgggctgattttggacagtggagccactcataccactgcaattccagtccacgatggctatgtccttcaacaaggcattgtgaaatcccctcttgctggagactttattactatgcagtgcagagaactcttccaagaaatgaatattgaattggttcctccatatatgattgcatcaaaagaagctgttcgtgaaggatctccagcaaactggaaaagaaaagagaagttgcctcaggttacgaggtcttggcacaattatatgtgtaattgtgttatccaggattttcaagcttcggtacttcaagtgtcagattcaacttatgatgaacaagtggctgcacagatgccaactgttcattatgaattccccaatggctacaattgtgattttggtgcagagcggctaaagattccagaaggattatttgacccttccaatgtaaaggggttatcaggaaacacaatgttaggagtcagtcatgttgtcaccacaagtgttgggatgtgtgatattgatatcagaccaggtctctatggcagtgtaatagtggcaggaggaaacacactaatacagagttttactgacaggttgaatagagagctgtctcagaaaactcctccaagtatgcggttgaaattgattgcaaataatacaacagtggaacggaggtttagctcatggattggcggctccattctagcctctttgggtacctttcaacagatgtggatttccaagcaagaatatgaagaaggagggaagcagtgtgtagaaagaaaatgcccttgagaaagagttcccaagcttctaccttccttttgtcaccttacgtttcatagctttagtatactcaggaaaagaatgaccatcttttgtagaatgtttatacatttatgcatatttcaatttccacttaaatttatttaaagctttaactggctctataaattaagtttgtgctttccttgaaatgcacttattcttattacaagcattttataattttgtataaatgtctattttctctaaatattttgctttcagtaaaatgctttccaactctgtttagtgtattaattaccagtggattggtagaactgcttttattgactagtaaaagttactgcctagtctttttaccttaggcttacagaattaaataaaaattagccattccagaaatataaaaaaaaaaaaaaaaaaaa

SEQ ID NO: 708 - protein, 429 aa, Homo sapien
MSGGVYGGDEVGALVFDIGSYTVRAGYAGEDCPKVDFPTAIGMVVERDDGSTLMEIDGDKGKQGGPTYYIDTNALRVPRENMEAISPLKNGMVEDWDSFQAILDHTYKMHVKSEASLHPVLMSEAPWNTRAKREKLTELMFEHYNIPAFFLCKTAVLTAFANGRSTGLILDSGATHTTAIPVHDGYVLQQGIVKSPLAGDFITMQCRELFQEMNIELVPPYMIASKEAVREGSPANWKRKEKLPQVTRSWHNYMCNCVIQDFQASVLQVSDSTYDEQVAAQMPTVHYEFPNGYNCDFGAERLKIPEGLFDPSNVKGLSGNTMLGVSHVVTTSVGMCDIDIRPGLYGSVIVAGGNTLIQSFTDRLNRELSQKTPPSMRLKLIANNTTVERRFSSWIGGSILASLGTFQQMWISKQEYEEGGKQCVERKCP

SEQ ID NO: 709 - DNA, 2341 bp, Homo sapien
agtgtaagcagtgtgcaaacaaggtgttacagcacatgaaggccgtgcaggcagatcaggagcgggagaggcagcggcggctggaagtagaacgtgaggcagagaagaagcgtgaggctaagcagcgagctaaggaagctcaggagcgggaactgcggaagcgggagaaggcggaagagaaggagcgccggagaaaggagtatgatgccctcaaagcagccaagcgggagcaggagaagaaacctaagaaggaagcaaatcaggccccgaaatctaagtctggctcccgtccccgcaagccaccaccccggaagcacactcgttcctgggctgtgctgaagctgctgctgctgctgctgctatttggtgtggcgggagggctggttgcttgtcgggtgacagagctgcagcagcagcccctctgcaccagcgtgaacaccatctatgacaatgcggtccagggtctacgccgccatgagatcctccagtgggtccttcagaccgactctcagcagtgagcttgttcccagcacctgctgcctcccagccttggagtttggattcctatggaattgggttctgctggacacaacctctttttagcatcagacctacctgccatcatcaaatggctgcagattggtacatgagacctcctctttgtaggacttcttcattccttagtcagggttccctgaaggaatgaggagaaatgggaggtggcgggggggcgtggggggcagttacctgcatgcctaaaggagtaggcttgggggtggggagagagaaaacatagccttttctagttgttatataaagctgtgtaaaggcaaggctcgtttctactaaatggtcagctgtcactacatttatacttttgtatgccacaaaccctttcattcctccctgggaatcagggtagatcaggaggaactgggggggactagaacaccacgctcagtaaatccagtctaaactgggaggtaggggtattcctgttttctttaggacctcagagatgtaagcattttagcagccacacaaaatctctggctatgaaagggacttcatgaccatccagtccaatataacacttgcagacagagaaactgaggtcttccatgacttgcctagtctcccagctagtttgaggcaaaactggattcccactctggtattctttcttccctttacatcattttccctcctttataatgtcctgagagaccagaactcacaccagaatcgattattcctcaggtgaagcatagactctttcatggtagacagatttcacgactcagagatagaaatctcttgctatcatcaggtcacgggcagctcctgtggagtcctgcccaacttatgtggcttccataaaatggcaacagtccaggctccttgcctaattttagagcattaactccctaattgccagtaagcaaggaggtggatctctgcaaacctacactgtctatgacagctctagttgtacttggtgtgactaaatacctcaaaggcaacctgcttctgcaggttttgaagtgtcagcttcataagacactgaggtttagaattgtttgattctagaccataactgaagggcataaatggaaacaggatatgaagggaaacaagtagcatcatggagctgaaaagtggtgcatcacccaatggctagcacaaacaaggatcacactgtccattctcttgtctgctaaattaagcattttcttgcctcctttgcttcatcttttcacaacagctggatagagggatcagaaatgactgtgtcatggtgctcattcactgcaaactcccagttgcaagctccttggctcccccggagggagcaagaatctcatagttcagagacacagagggccttttagccctaatgaccttttggatgggactgcaactcatgactatcctgatattggaagaaaggactttgttaatcttctcccccatagctctgctgcgtaggtctacatcttactcagaatcactacacattcctttagtcttcctccaagctccagagccattggtacaaatgctttattgaaactaaatacataatacacacaatgagatgaagacaatatagaagtccgcatagtcatcataatcccgttccttggccggttgaggcagctcagtggctgagcccagtcaagccaacccgcagcttcactcacgacttcaagatttgatgctaattcttttggatttctacagttattaaataagtgtctgagtggacaaaaaaaaaaaaaaaaaaaaaaaaaaaaaaaaaaaaaaaaaaaaaaaaaaaaaaaaaaaaaaaaaaaaaaaa

SEQ ID NO: 710 - protein, 160 aa, Homo sapien
MKAVQADQERERQRRLEVEREAEKKREAKQRAKEAQERELRKREKAEEKERRRKEYDALKAAKREQEKKPKKEANQAPKSKSGSRPRKPPPRKHTRSWAVLKLLLLLLLFGVAGGLVACRVTELQQQPLCTSVNTIYDNAVQGLRRHEILQWVLQTDSQQ

SEQ ID NO: 711 - DNA, 2556 bp, Homo sapien
gggaccctggtgaccaaagtggctccggtcagcgcccctcctaaagtcagcagcggccctaggctgcctgctcctcagatagtcgccgtgaaagcccccaacaccacgacaatccagtttcctgctaatttgcagcttcctccaggaaccgttttgattaaaagtaacagtggtccgttgatgttggtatctcctcagcaaactgtaacaagagccgagaccacaagtaacataacctcaaggccagcagtaccagcgaatcctcaaacagtcaaaatctgtacagtgccgaactctagctcacaattaatcaagaaagtggcagtgacacctgttaaaaaattggcacaaataggaactactgtggtaaccactgttccgaagccttcctcagtacaatctgtggctgtgccaaccagtgtcgtcacagttactcctggaaagccattgaatactgtaactaccctgaagccttcaagtttgggagcatcatccactccttcaaatgagcccaatcttaaagcagagaactcagcagctgttcagattaatctttctccgacaatgctagaaaatgtgaagaaatgcaagaacttccttgcaatgttaataaaactagcatgtagtggatcacagtcccctgaaatggggcaaaatgtgaagaagctggtggaacaacttttggatgcaaaaatcgaagcagaagaatttactaggaaactgtatgttgaactcaagtcttcacctcagcctcacctggttccttttcttaagaaaagcgtggttgccttacgacaacttctgcctaactcccagagcttcatccagcaatgtgttcagcagacttctagtgacatggtcattgctacctgtactacaacagtaacaacttctcctgtggtgacaactacagtgtcctcaagccagtctgaaaagtcaattattgtttctggagcaacagcacccagaactgtgtcagtgcaaactttgaacccacttgctggtccagtgggagcaaaagctggagttgtgacacttcattctgtgggcccaactgctgcaacaggaggaacaacagctggaactggtttgcttcagacttcaaaaccacttgtgacatctgtggcaaacacagtgaccacggtctcactgcaacctgaaaagccagttgtctctggaacagcagtaacactgtcccttccagcagtaacttttggagaaacttcaggtgcagctatttgtcttccatctgtgaaacctgttgtttccttctgctgggaccacatctgcaagcctgttattgggactccagttcaaatcaaacttgcccagccgggccctgtcctttcacaaccagctgggattccaacaggcagttcaagcaagcaactattctcattgtttcacgtagttcagcagccttcaggaggcaatgaaaaacaagtgaccacaatttcacattcctcaacattgaccattcagaaatgtggacagaagacgatgccagtgaacaccataatacctactagtcagtttcctccagcttccattctaaagcaaattactctgcctggaaataaaattctgtcacttcaagcatctcctactcagaaaaatagaataaaagagaatgtaacatcatgcttccgagatgaggatgacatcaatgatgtgacttctatggcaggggtcaaccttaatgaagaaaatgcctgcatcttagcaacaaactctgaattggttggcacactcattcagtcatgtaaagatgaaccatttctttttattggagctctacaaaagagaatcttagacattggtaaaaagcatgacattacagaacttaactctgatgctgtgaacttgatctcccaagcaacacaggaacgactacgaggccttctagaaaaactgactgcaattgctcagcatcgaatgactacttacaaggcaagtgaaaattacatcctgtgtagtgataccaggtcacagctcaaatttcttgaaaagctggatcaattggagaagcagagaaaggatttggaagaaagagaaatgttacttaaggcagccaagagtcgttctaataaagaagatccagaacagctgagattaaagcagaaagccaaagagttacagcaattggaacttgcacagatacagcatagagacgctaatctcacagctcttgcagctattggaccaaggaagaagagaccactagaatctggaattgagggcttaaaagacaaccttcttgcttctgggacatccagcctgacagccaccaaacagttgcatcgtccaagaatcacgagaatctgcctcagggacttgatattttgtatggaacaggaacgggagatgaagtattctcgagctctatacctggcccttctgaagtgaccactccactcttccatccacatccttgctatttactgccaaagaagacacaaagcattgttgcactgtcctgaaatttcaatttctggaaaataacaccaacatgaaagagcattgtttacgattagaactttattaactcttacctat

SEQ ID NO: 712 - protein, 801 aa, Homo sapien
GTLVTKVAPVSAPPKVSSGPRLPAPQIVAVKAPNTTTIQFPANLQLPPGTVLIKSNSGPLMLVSPQQTVTRAETTSNITSRPAVPANPQTVKICTVPNSSSQLIKKVAVTPVKKLAQIGTTVVTTVPKPSSVQSVAVPTSVVTVTPGKPLNTVTTLKPSSLGASSTPSNEPNLKAENSAAVQINLSPTMLENVKKCKNFLAMLIKLACSGSQSPEMGQNVKKLVEQLLDAKIEAEEFTRKLYVELKSSPQPHLVPFLKKSVVALRQLLPNSQSFIQQCVQQTSSDMVIATCTTTVTTSPVVTTTVSSSQSEKSIIVSGATAPRTVSVQTLNPLAGPVGAKAGVVTLHSVGPTAATGGTTAGTGLLQTSKPLVTSVANTVTTVSLQPEKPVVSGTAVTLSLPAVTFGETSGAAICLPSVKPVVSFCWDHICKPVIGTPVQIKLAQPGPVLSQPAGIPTGSSSKQLFSLFHVVQQPSGGNEKQVTTISHSSTLTIQKCGQKTMPVNTIIPTSQFPPASILKQITLPGNKILSLQASPTQKNRIKENVTSCFRDEDDINDVTSMAGVNLNEENACILATNSELVGTLIQSCKDEPFLFIGALQKRILDIGKKHDITELNSDAVNLISQATQERLRGLLEKLTAIAQHRMTTYKASENYILCSDTRSQLKFLEKLDQLEKQRKDLEEREMLLKAAKSRSNKEDPEQLRLKQKAKELQQLELAQIQHRDANLTALAAIGPRKKRPLESGIEGLKDNLLASGTSSLTATKQLHRPRITRICLRDLIFCMEQEREMKYSRALYLALLK

SEQ ID NO: 713 - DNA, 1269 bp, Homo sapien
atggcggcggcggcggtggtggagttccagagagcccagtctctactcagcaccgaccgggaggcctccatcgacatcctccactccatcgtgaagcgtgacattcaggaaaacgatgaagaggcagtgcaagtcaaagagcagagcatcctggaactgggatctctcctggcaaagactggacaagctgcagagcttggaggactcctgaagtatgtacgacccttcttgaattccatcagcaaggctaaagcagctcgcctggtccgatctcttcttgatctgtttcttgatatggaagcagctacagggcaggaggtcgagctgtgtttagagtccatcgaatgggccaagtcagagaaaagaactttcttacgccaagctttggaggcaagactggtgtctttgtactttgataccaagaggtaccaggaagcattgcatttgggttctcagctgctgcgggagttgaaaaagatggacgacaaagctcttttggtggaagtacagcttttagaaagcaaaacataccatgccctgagcaacctgccgaaagcccgagctgccttaacttctgctcgaaccacagcaaatgccatctactgcccccctaaattgcaggccaccttggacatgcagtcgggtattatccatgcagcagaagagaaggactggaaaactgcgtactcatacttctatgaggcatttgagggttatgactccatcgacagccccaaggccatcacatctctgaagtacatgttgctgtgcaaaatcatgctcaacaccccagaagatgtccaggctttggtgagcgggaagcttgcacttcggtatgcagggaggcagacagaagcattaaaatgcgtggctcaggctagcaagaacagatcactggcagattttgaaaaggctctgacagattaccgggcagagctccgggatgacccaatcatcagcacacacttggccaagttgtatgataacttactagaacagaatctgatccgagtcattgagcctttttccagagtacagattgaacacatatctagtctcatcaaactctccaaggccgacgtggaaaggaaattatcacagatgattcttgacaagaaatttcatgggattttggaccagggggagggtgtcctgattattttcgatgaacccccagtagataaaacttacgaagctgctctggaaacaattcagaacatgagcaaagtagtggattccctctacaacaaagccaagaaactgacatag

SEQ ID NO: 714 - protein, 422 aa, Homo sapien [sequence omitted]

SEQ ID NO: 715 - DNA, 490 bp, Homo sapien
gagatggtgattaaatccgggacttttagcatatggaacagaccaagagggattgtttcagagagggcatctcatgtgcagaaaaacaggttgtgaagtcaaacgcagctcagattctcaccagctgtgcgtataccctgacgagtcccctcaccattctgggccttagtcccctctgaaaaatgggacatgggcaccagagagactcctgagagctcccttagtgctcttagaggagacaggggaggtctcctttatctttgacccctaacccctcagacttccagaggcgggaactgcagcgatgatacaaatggtgtggtggaaagaatgccgttttggagtcaggacacctgggtttgaatccacttgcagccacttgcaggctgcttgaccttgaacgtatcgtgtcgtatcgtttcaccttgggatctgtacctgtgaagtgggtgaaagttaaagagataataaagtaacagtcgtgaaaaaa

SEQ ID NO: 716 - protein, 31 aa, Homo sapien
EMVIKSGTFSIWNRPRGIVSERASHVQKNRL

SEQ ID NO: 717 - DNA, 2357 bp, Homo sapien
gatccggaagtcggagcctagctgcgcgagagtttctgctcgctcaaccgagttgtcgtgttgccctcgcttctcagatccccgccggaagtgaagagagcaagcagatttgaacctatctgctttcaagctggtcatcatgatgaaacttagacacaaaaataaaaagccaggtgaaggttccaagggccacaagaagataagttggccctaccctcagcctgcaaagcaaaatgggaagaaagcaacctccaaagtgccctctgcacctcattttgttcaccccaatgatcatgccaatcgagaggctgaattaaagaagaagtgggttgaggagatgagggagaagcagcaagccgcccgggagcaagaaagacaaaaacgcaggaccattgagagctactgtcaggatgtcctaagacgccaggaggagtttgagcataaggaggaagttttgcaggaattaaatatgtttcctcagctggatgacgaggccacgaggaaggcttattacaaggagttccgtaaggtggtggaatactctgatgtgattctggaagtcctggatgccagagacccattaggctgccgctgcttccaaatggaggaggctgtcctgcgagcacaaggcaacaagaagctggtcctggtcttgaacaagattgacctggtccccaaggaggttgtggagaaatggctggattaccttcggaatgagttgccaaccgtggctttcaaggccagtacccagcatcaggtcaaaaacctgaatcgttgcagtgtgccagtagatcaggcctctgagtcactgctgaaaagcaaagcctgctttggagctgaaaacctcatgagggttctggggaactattgccgccttggtgaagtgcgcacccacattcgtgtgggtgttgtgggtcttcccaatgttgggaagagcagcctgatcaatagcctgaagcgcagccgcgcatgcagcgtgggagctgttcctggaattaccaaattcatgcaggaggtctacctggacaagttcatccggctcttggatgctccaggcattgtcccagggcccaactcagaggtgggcaccatcctgcgtaactgcgtccacgtgcagaagctggcagaccctgtgaccccagtggagaccatcctgcagcgctgcaacctggaggagatttccaactattatggcgtctctgggttccagaccactgagcactttctgacggcagtggcccaccgtttggggaagaagaagaagggaggcttatatagtcaggaacaggcggccaaagctgtcctagctgactgggtgagcgggaagatcagcttctatataccaccaccagccactcacactctgcccacccatctcagtgctgagatcgttaaggaaatgaccgaggtctttgacatcgaggatactgagcaggccaatgaagacaccatggaatgcttggccaccggagaatctgatgagctgttgggtgacacggacccacttgaaatggagatcaagttgctccattctccgatgacgaaaatagcagatgccattgaaaataaaaccaccgtgtataagattggagatctcactgggtattgcaccaatccaaaccgtcatcagatggggtgggctaaacgcaatgtggaccaccgccctaagagcaacagtatggtggatgtctgctcagtggaccgccgctcagtgctgcagaggatcatggagacggaccccctgcaacagggccaggctctggcatctgccctgaaaaataagaagaagatgcagaaacgtgcagataaaatcgccagcaagctgtctgattccatgatgtctgctctcgacctctctggcaatgctgatgatggtgttggtgactaatcgactgatctcacttcccttccgctccaagcaccagttccggtggtacgggggaataccagtgaaatagtttggttctccctgaagcatctgcatattgaaagaacgctttccccactgtgtgtcttctccccctcctccagtaaaaacagtcccggctgggtgctgtggctcacgtctgtaatcccagcactttgggaggccgaggtgggcggatcacctgaggtcgggagttcgagaccagcctggccaacatggtgaggccccgtctctactaaaaatacaaaaaaatttagccgtgcttggtggcacctgtaatcccagctacttgggaggctgaggcaggagaatcgcctgaacctgggagactaaggcaggagaatcgcctgaacctgggaggcagaggttgcagtgagcccagacggcaccattgcactctagcctgggcaacaacacgaaactccgtccc

SEQ ID NO: 718 - protein, 582 aa, Homo sapien
MMKLRHKNKKPGEGSKGHKKISWPYPQPAKQNGKKATSKVPSAPHFVHPNDHANREAELKKKWVEEMREKQQAAREQERQKRRTIESYCQDVLRRQEEFEHKEEVLQELNMFPQLDDEATRKAYYKEFRKVVEYSDVILEVLDARDPLGCRCFQMEEAVLRAQGNKKLVLVLNKIDLVPKEVVEKWLDYLRNELPTVAFKASTQHQVKNLNRCSVPVDQASESLLKSKACFGAENLMRVLGNYCRLGEVRTHIRVGVVGLPNVGKSSLINSLKRSRACSVGAVPGITKFMQEVYLDKFIRLLDAPGIVPGPNSEVGTILRNCVHVQKLADPVTPVETILQRCNLEEISNYYGVSGFQTTEHFLTAVAHRLGKKKKGGLYSQEQAAKAVLADWVSGKISFYIPPPATHTLPTHLSAEIVKEMTEVFDIEDTEQANEDTMECLATGESDELLGDTDPLEMEIKLLHSPMTKIADAIENKTTVYKIGDLTGYCTNPNRHQMGWAKRNVDHRPKSNSMVDVCSVDRRSVLQRIMETDPLQQGQALASALKNKKKMQKRADKIASKLSDSMMSALDLSGNADDGVGD

SEQ ID NO: 719 - DNA, 765 bp, Homo sapien
  unsure 387-419: unknown base
gggtgctttactccttctgtgcttggaggcttacccaactgaaaggagatggagggcaggagaggccgatgcctagcgtgcctgctgcttacaggggtggtgtcacaggtcaccattattcattaaaattttacttttttgatcccctaccacatgctcaacatggtattgagtcctcaagaatataaaaagaaaatacaacaggaaccagtagtcattaactgtttgttctggactttaataaaagtacagagggtcttggagtacaaaggcaaagacatttagctgtgtatagaatgggtgggggaatgtgttccatggtttggcattcagttcagcaacattcctgagagaaatcaactagcccccttatagagaagaggaaannnnnnnnnnnnnnnnnnnnnnnnnnnnnnnnnaggaatttcttttttatagtattggataaagtttggtgtttttacagaggagaagcaatgggtcttagctctttctctattatgttatcatcctcccttttttgtacaatatgttgtttacctgaaaggaaggtttctattcgttggttgtggacctggacaaagtccaagtctgtggaacttaaaaccttgaaggtctgtcataggactctggacaatctcacaccttagctattcccagggaaccccagggggcaactgacattgctcacaagatgttctcctgatgtagcttgagatataaaggaaaggcctgcacaggtggctgtttcttgtctgttatgtc

SEQ ID NO: 720 - protein, 61 aa, Homo sapien
VLYSFCAWRLTQLKGDGGQERPMPSVPAAYRGGVTGHHYSLKFYFFDPLPHAQHGIESSRI

SEQ ID NO: 721 - DNA, 2923 bp, Homo sapien
gagacatacaggacagagcatggctcgcctacagactgcactcctggttgtcctcgtcctccttgctgtggcgcttcaagcaactgaggcaggcccctacggcgccaacatggaagacagcgtctgctgccgtgattacgtccgttaccgtctgcccctgcgcgtggtgaaacacttctactggacctcagactcctgcccgaggcctggcgtggtgttgctaaccttcagggataaggagatctgtgccgatcccagagtgccctgggtgaagatgattctcaataagctgagccaatgaagagcctactctgatgaccgtggccttggctcctccaggaaggctcaggagccctacctccctgccattatagctgctccccgccagaagcctgtgccaactctctgcattccctgatctccatccctgtggctgtcacccttggtcacctccgtgctgtcactgccatctcccccctgacccctctaacccatcctctgcctccctccctgcagtcagagggtcctgttcccatcagcgattcccctgcttaaacccttccatgactccccactgccctaagctgaggtcagtctcccaagcctggcatgtggccctctggatctgggttccatctctgtctccagcctgcccacttcccttcatgaatgttgggttctagctccctgttctccaaacccatactacacatcccacttctgggtctttgcctgggatgttgctgacactcagaaagtcccaccacctgcacatgtgtagccccaccagccctccaaggcattgctcgcccaagcagctggtaattccatttcatgtattagatgtcccctggccctctgtcccctcttaataaccctagtcacagtctccgcagattcttgggatttgggggttttctcccccacctctccactagttggaccaaggtttctagctaagttactctagtctccaagcctctagcatagagcactgcagacaggccctggctcagaatcagagcccagaaagtggctgcagacaaaatcaataaaactaatgtccctcccctctccctgccaaaaggcagttacatatcaatacagagactcaaggtcactagaaatgggccagctgggtcaatgtgaagccccaaatttgcccagattcacctttcttcccccactcccttttttttttttttttttttgagatggagtttcgctcttgtcacccacgctggagtgcaatggtgtggtcttggcttattgaagcctctgcctcctgggttcaagtgattctcttgcctcagcctcctgagtagctgggattacaggttcctgctaccacgcccagctaatttttgtatttttagtagagacgaggcttcaccatgttggccaggctggtctcgaactcctgtcctcaggtaatccgcccacctcagcctcccaaagtgctgggattacaggcgtgagccacagtgcctggcctcttccctctccccactgccccccccaactttttttttttttttatggcagggtctcactctgtcgcccaggctggagtgcagtggcgtgatctcggctcactacaacctcgacctcctgggttcaagtgattctcccaccccagcctcccaagtagctgggattacaggtgtgtgccactacggctggctaatttttgtatttttagtagagacaggtttcaccatattggccaggctggtcttgaactcctgacctcaagtgatccaccttccttgtgctcccaaagtgctgagattacaggcgtgagctatcacacccagcctccccctttttttcctaataggagactcctgtacctttcttcgttttacctatgtgtcgtgtctgcttacatttccttctcccctcaggctttttttgggtggtcctccaacctccaatacccaggcctggcctcttcagagtaccccccattccactttccctgcctccttccttaaatagctgacaatcaaattcatgctatggtgtgaaagactacctttgacttggtattataagctggagttatatatgtatttgaaaacagagtaaatacttaagaggccaaatagatgaatggaagaattttaggaactgtgagagggggacaaggtgaagctttcctggccctgggaggaagctggctgtggtagcgtagcgctctctctctctgtctgtggcaggagccaaagagtagggtgtaattgagtgaaggaatcctgggtagagaccattctcaggtggttgggccaggctaaagactgggagttgggtctatctatgcctttctggctgatttttgtagagacggggttttgccatgttacccaggctggtctcaaactcctgggctcaagcgatcctcctggctcagcctcccaaagtgctgggattacaggcgtgaatcactgcgcctggcttcctcttcctcttgagaaatattcttttcatacagcaagtatgggacagcagtgtcccaggtaaaggacataaatgttacaagtgtctggtcctttctgagggaggctggtgccgctctgcagggtatttgaacctgtggaattggaggaggccatttcactccctgaacccagcctgacaaatcacagtgagaatgttcaccttataggcttgctgtggggctcaggttgaaagtgtggggagtgacactgcctaggcatccagctcagtgtcatccagggcctgtgtccctcccgaacccagggtcaacctgcctgccacaggcactagaaggacgaatctgcctactgcccatgaacggggccctcaagcgtcctgggatctccttctccctcctgtcctgtccttgcccctcaggactgctggaaaataaatcctttaaaatagtaaaaaaaaaaaaaaa

SEQ ID NO: 722 - protein, 93 aa, Homo sapien
MARLQTALLVVLVLLAVALQATEAGPYGANMEDSVCCRDYVRYRLPLRVVKHFYWTSDSCPRPGVVLLTFRDKEICADPRVPWVKMILNKLSQ

SEQ ID NO: 723 - DNA, 1276 bp, Homo sapien
ggcaggcgcgtggccgggccgcggcgcgatgagtggggcccgggcggcgcccggggccgcgggcaacggcgcggtccgggggctgcgggtggacgggctgcccccgctgccaaagagcttgagcgggctgctgcactcggcgtcgggcggcggcgcgtctgggggctggcggcacctggagcggctgtacgcgcagaagtcgcgcatccaggacgagctgagccgcgggggcccgggcggcggcggggcccgggcggcagcgctgcccgccaagcctcccaacctggacgccgctctggcgctgctccgcaaagagatggttggtctccgccagctggacatgtccttgctctgccaactgtacagcctctacgagtcgattcaggagtacaagggggcatgccaggcagcctccagcccagactgcacttacgctctggagaacggcttcttcgatgaagaggaggaatatttccaggagcagaactccctgcacgacaggagggaccgaggccctcctcgggacttgtcactgcctgtctcctccctctccagcagcgactggattctggagtccatctagagggtcttgggagggatgtgactgttgggaagcccttcctactggacacgctgtcatcatttgctgcttctcttgcaagaaagcacctccgttgtggacggtcctcgggcacaggggatgagcgctaccagtttcatttgtaggcagggagttctccgcggatgcatggtggcagtctgctttgatggcagcagttatctgcttaggtgacctagaggtcctcagcagtatcctccacacctatttattgaggtgcacctgctggggattcataatgagaatataacaagaggatctcggtgaaaggccttagtgggtgttttgtgtgaggtggcttgtagctagctacttccttacagatggtagagtattccaatcctctttgtgttagggttcttgcttccagtttgggatgtattaaaaccaccatttcactgcttcccttcctcaatatgctctgcagcttttcttgctgtttaaacctctcgcctcagctttatttatttgtaagctgcattactaactgcccagtgattcggtgaaagctttttactgaaaaagttaacatttctagtcatcccaatcaactggcttttttcaaccaaaattttatatcattctttgtctatcagatacgagaggaaggaagataatacgaagacatgttgaatagtgaaaaaaaaaaaaaaaaaa

SEQ ID NO: 724 - protein, 184 aa, Homo sapien
MSGARAAPGAAGNGAVRGLRVDGLPPLPKSLSGLLHSASGGGASGGWRHLERLYAQKSRIQDELSRGGPGGGGARAAALPAKPPNLDAALALLRKEMVGLRQLDMSLLCQLYSLYESIQEYKGACQAASSPDCTYALENGFFDEEEEYFQEQNSLHDRRDRGPPRDLSLPVSSLSSSDWILESI

SEQ ID NO: 725 - DNA, 2021 bp, Homo sapien
aaatgcagagaagaatgggcaaagaccaaagacccaactgctgccctcagaaaactacctgtcaaaaggtgtgtggaagggcagctgcttcgaggactttcaaaatatggaatgaagaatatagtctctgcatttggcataatacccagaaataatcgcttaatgtatattcatagctaccaaagctatgtgtggaataacatggtaagcaagaggatagaagactatggactaaaacctgttccaggggacctcgttctcaaaggagccacagccacctatattgaggaagatgatgttaataattactctatccatgatgtggtaatgcccttgcctggtttcgatgttatctacccaaagcataaaattcaagaagcctacagggaaatgctcacagctgacaatcttgatattgacaacatgagacacaaaattcgagattattccttgtcaggggcctaccgaaagatcattattcgtcctcagaatgttagctgggaagtcgttgcatatgatgatcccaaaattccacttttcaacacagatgtggacaacctagaagggaagacaccaccagtttttgcttctgaaggcaaatacagggctctgaaaatggatttttctctacccccttctacttacgccaccatggccattcgagaagtgctaaaaatggataccagtatcaagaaccagacgcagctgaatacaacctggcttcgctgagcagtaccttgtccacagattagaaaacgtacacaagtgtttgcttcctggctccctgtgcatttttgtcttagttcagactcatatatggatttcaaatctttgtaataaaaattatttgtatttttaagtttttattagcttaaagaaataatttgcaatatttgtacatgtacacaaatcctgaggttcttaattttagctcagaatataaattagtcaaaatacacttcaggtgcttaaatcagagtaaaatgtcagctttacaataataaaaaaaggactttggtttaaagtagcaggtttaggttttgctacattctcaaaagacagcaggagtatttgacacatctgtgatggagtatacaacaatgcattttaagagcaaatgcaacaaaacaaatctggactatggataaataatttgagagctgccacccacaaatataaatacagtactcatgctgactgaaataataagacatctacaaatttataaacaaaaagtgattgtcattatcctgcttatgtactagattcaggcaagcattatagactttttggttgcggtggcttttgcatttatattatcaatgccttgcaggaacgttgcattgataggcccattttatttttttattttttttttcgagacaggatctcactctgtagcacaggctggattgcagtgcaatcctgcaattctcaatcttgcactgcagcctcgacctcccaggctccagtgactctcccacctcagcctcctaagtagctgggagtacaggcgcgcaccaccacgcctagctgatttttgtatttttttgtagagacgggggtttggccatgttgccgaggctaactcctgggattacaggcatgagctgtgctggccgggtttttttttcttgatgtaaacgtgtacagctgttttattagttaaggtctaatttttactctaggtgccttttatgttcagaactctttccactggactggtatttgctcaaaaataaataatggtagagaagaaaactataaaaatggacaaggctttcttctatcagtagcgtttaccctttgtcaccagtggctttggtatttccatgtctggcattgcataaacttctctggtgtgaaaggataaatatgcctttctaaagttgtatatcaaaattgtatcaatttttattttctatgatttctagaaacaaatgtaataaatatttttaaaatctcctttctactggttatgtaaataaatcaaataaatatatcaaaaaaaaaaaaaaaaa

SEQ ID NO: 726 - protein, 205 aa, Homo sapien
MKNIVSAFGIIPRNNRLMYIHSYQSYVWNNMVSKRIEDYGLKPVPGDLVLKGATATYIEEDDVNNYSIHDVVMPLPGFDVIYPKHKIQEAYREMLTADNLDIDNMRHKIRDYSLSGAYRKIIIRPQNVSWEVVAYDDPKIPLFNTDVDNLEGKTPPVFASEGKYRALKMDFSLPPSTYATMAIREVLKMDTSIKNQTQLNTTWLR

SEQ ID NO: 727 - DNA, 1335 bp, Homo sapien
atggcagtgacaactcgtttgacatggttgcacgaaaagatcctgcaaaatcattttggagggaagcggcttagccttctctataagggtagtgtccatggattccgtaatggagttttgcttgacagatgttgtaatcaagggcctactctaacagtgatttatagtgaagatcatattattggagcatatgcagaagagagttaccaggaaggaaagtatgcttccatcatcctttttgcacttcaagatactaaaatttcagaatggaaactaggactatgtacaccagaaacactgttttgttgtgatgttacaaaatataactccccaactaatttccagatagatggaagaaatagaaaagtgattatggacttaaagacaatggaaaatcttggacttgctcaaaattgtactatctctattcaggattatgaagtttttcgatgcgaagattcactggatgaaagaaagataaaaggggtcattgagctcaggaagagcttactgtctgccttgagaacttatgaaccatatggatccctggttcaacaaatacgaattctcctcctgggtccaattggagctcccaagtccagctttttcaactcagtgaggtctgttttccaagggcatgtaacgcatcaggctttggtgggcactaatacaactgggatatctgagaagtataggacatactctattagagacgggaaagatggcaaatacctgccgtttattctgtgtgactcactggggctgagtgagaaagaaggcggcctgtgcagggatgacatattctatatcttgaacggtaacattcgtgatagataccagtttaatcccatggaatcaatcaaattaaatcatcatgactacattgattccccatcgctgaaggacagaattcattgtgtggcatttgtatttgatgccagctctattcaatacttctcctctcagatgatagtaaagatcaaaagaattcaaagggagttggtaaacgctggtgtggtacatgtggctttgctcactcatgtggatagcatggatttgattacaaaaggtgaccttatagaaatagagagatgtgagcctgtgaggtccaagctagaggaagtccaaagaaaacttggatttgctctttctgacatctcggtggttagcaattattcctctgagtgggagctggaccctgtaaaggatgttctaattctttctgctctgagacgaatgctatgggctgcagatgacttcttagaggatttgccttttgagcaaatagggaatctaagggaggaaattatcaactgtgcacaaggaaaaaaatag

SEQ ID NO: 728 - protein, 444 aa, Homo sapien
MAVTTRLTWLHEKILQNHFGGKRLSLLYKGSVHGFRNGVLLDRCCNQGPTLTVIYSEDHIIGAYAEESYQEGKYASIILFALQDTKISEWKLGLCTPETLFCCDVTKYNSPTNFQIDGRNRKVIMDLKTMENLGLAQNCTISIQDYEVFRCEDSLDERKIKGVIELRKSLLSALRTYEPYGSLVQQIRILLLGPIGAPKSSFFNSVRSVFQGHVTHQALVGTNTTGISEKYRTYSIRDGKDGKYLPFILCDSLGLSEKEGGLCRDDIFYILNGNIRDRYQFNPMESIKLNHHDYIDSPSLKDRIHCVAFVFDASSIQYFSSQMIVKIKRIQRELVNAGVVHVALLTHVDSMDLITKGDLIEIERCEPVRSKLEEVQRKLGFALSDISVVSNYSSEWELDPVKDVLILSALRRMLWAADDFLEDLPFEQIGNLREEIINCAQGKK

SEQ ID NO: 729 - DNA, 3495 bp, Homo sapien
gcagacgctgccgtggaatccttgactctagttctctgagtcgattgtgatcatggctgctgagtctgatgttctgcatttccagtttgaacagcaaggagatgtggtcttgcagaaaatgaatcttttgagacagcagaatttattttgtgatgtatcaatttacattaatgacactgagttccaggggcacaaggtgattttggctgcttgctccacttttatgagagatcagtttttactcacacagtcaaaacatgtcagaatcaccatcttacagagtgcagaagttggcagaaaattgttactgtcttgctatactggagcacttgaagttaaaaggaaagagcttttgaaatacttgactgctgccagttaccttcagatggttcacattgtggaaaagtgcacagaagctttgtcaaagtatctggaaattgatctttctatgaaaaacaacaaccaacacactgacctgtgtcagtcttctgatcctgatgttaagaatgaagatgaaaattctgataaagactgtgagataattgaaatttcagaagatagtcctgtaaacatagatttccatgttaaagaagaggaaagcaatgctttgcagtctacagtagagagtctgacatcagagagaaaggaaatgaagtcaccagagctgtctacagtagacataggttttaaagacaatgaaatttgtatccttcatgtagaatccatcagtacagctggtgtcgaaaatgggcagttttcacagccttgtacctcttcaaaagcaagcatgtatttctctgaaacacagcattcattgatcaattctacagttgagagcagagtggctgaagttcctgggaatcaagatcagggcttattttgtgagaatactgaaggaagttatggtacagtgagtgagattcagaatctggaggaaggttattcactgaggcaccagtgccccaggtgtcctcgaggctttcttcatgttgaaaactatctgcgccaccttaaaatgcataaactattcttatgcttacagtgcggaaaaacatttacacagaagaaaaatctcaaccgacacatccgaggacacatgggcatacggccctttcagtgtactgtgtgcttgaagacatttactgccaaaagcacacttcaggaccacttgaacatacacagtggggatcggccatacaaatgccactgttgtgatatggatttcaagcacaagtctgctctcaaaaagcacttaacctctgtccatggcagaagcagtggtgaaaaactatctaggcctgatctcaaaaggcaaagtctactataattataatcacagacttgttatataamgtttgtattattctattacgcaagtctttctgtagagatgcagcatttgtaatatttcatccccccaatctttgtttcttatattttgtcggcttacacataatcattctttctgaacttctaacagttccaaagttatgggaggcacagtaaagctgatgggattctgtctcatctcataccttacatataagtctcagtagtatccctagagaaatagtgttcctctcttatatattcttgattctagtgacaaaggatccagcagtatttgcagattccgatttggagtctctaggtaattgatttaagtataaaatccaatcatataaaaactttaatgaattaggataacaagaagagaaaataaaggtaaaaacactattacctgtttctagtcactttagaacagatggcactaaaaaaatttttttttaactttttaccagctgttcttggattccaaactaaacaccaagatacttttcattttaaaatgtataaagtaacaattcagattcacttgggaatagcagaatttttttatacagggttaataatccttaaaatacttttatttccatgccttattagtatacatacttaagaaatggttcattgggcccgagtttcttgattttatttaatacaatcggatttaataattttgtggccagtaaaattataccattggcatgaagctgtgaaaaatgagaaattctacctttaccagggatatctgttctactgttttaaaagttcctctctattttattttttatttaacatgaagtaaaattgaaatttcttcttggtgtatagttctgtgaattttaacagaaagatttgtgcaccactactgcagtcggtacagaacagttccttcactcccaatagctctcttatgctgtccctttgtagtcagctccttctagctctaatcctggcaacagttctccgtcactattattttgccttttctggactgtcatataaacagaatcttatagtacgttccctcttgaaatgctttttcacccagcataatgactttgaggttcatccatgtcattttaaattttgaattggcaatatatattctagctgttactagatgagcaatttaaaaaggtgtagctattagtgttgtattttttcatttacattaatgtaatttccattcactatgtgttgataaaaatcttaaccatccctagagttttatatttccaaaaatatgccaaaaggaaaactatgactgtatgattattttagcgagagtcatatttgagatggtgttctgagccatagttctctaacatctccgtctacatataacacaaaacttttataaattattttaacaaagattaaaatatactgcagggcaaataatattctctaaaacacaggaactgcttttcgtaaagaagactgactagatgcatctttctttgaagctgttctagtcctcctctagttaacttagctttatgtagaatytctactgtatttaatttytattgaagcccttctgtattttaaaatgtaatatactttgtaccatttataaaaattgtgtgatgaatgaatcacatgttcgttgttataagtgttaacctttttttgacaattttgtgggaaagacattctccactgaattttaactttccttgagactttcaagaatgcaggtctcgtttgatgaaaaaaccgacttcataaccyaatgttactagttagcgacattgtgctgaattctccttgaactttttaactttatatgtaaaataactttgatcttggtcatttgaaagatcatttccaggtctaaaattccatgattttgtatttaattctycctgagaacagaagaggggaaagcaagagaggacggttttgtgtctttatgaactttgttacttaagtactccattggagacataatttttctaattagtggatctttttccactggaaagtgtgatagctcattgctaatttttcattcatagttcattgcttccatttgacctaagattggccatttgttggtgtgaaaatattttcttttcagaaatagtttactagtgattgaagtacttttcttatttttgcttcctattataaaatggcgtgggg

SEQ ID NO: 730 - protein, 424 aa, Homo sapien
MAAESDVLHFQFEQQGDVVLQKMNLLRQQNLFCDVSIYINDTEFQGHKVILAACSTFMRDQFLLTQSKHVRITILQSAEVGRKLLLSCYTGALEVKRKELLKYLTAASYLQMVHIVEKCTEALSKYLEIDLSMKNNNQHTDLCQSSDPDVKNEDENSDKDCEIIEISEDSPVNIDFHVKEEESNALQSTVESLTSERKEMKSPELSTVDIGFKDNEICILHVESISTAGVENGQFSQPCTSSKASMYFSETQHSLINSTVESRVAEVPGNQDQGLFCENTEGSYGTVSEIQNLEEGYSLRHQCPRCPRGFLHVENYLRHLKMHKLFLCLQCGKTFTQKKNLNRHIRGHMGIRPFQCTVCLKTFTAKSTLQDHLNIHSGDRPYKCHCCDMDFKHKSALKKHLTSVHGRSSGEKLSRPDLKRQSLL

SEQ ID NO: 731 - DNA, 1617 bp, Homo sapien
atggcggtagcggcggcggcggcggcggctgggccggctggcgcgggaggcggccgggcgcagcggagcgggctgctggaagttttggtgcgggatcgctggcacaaagttctggtgaacttgagcgaggacgccctggttctgagcagcgaggagggcgctgcggcgtacaacggcatcgggaccgccaccaatggctcgttctgcaggggcgccggggctgggcacccgggcgcgggcggcgcgcagcccccggactcgcccgccggggtccgcaccgctttcaccgacctgcccgagcaggtgcccgagtccatctcgaaccagaagcgtggcgtgaaggtgctgaagcaggagctgggcgggctggggatcagcatcaaggggggcaaggagaacaagatgcccatcctcatcagcaagatcttcaaggggctggcggcggaccagacccaagccctgtacgtgggcgacgccatcctgtcggtgaacggagccgacctgcgggacgccacccacgacgaggcggtgcaggcgttgaagcgcgcgggcaaggaagtgctgctggaagtgaagtacatgcgagaagccacgccctatgtgaagaaaggatccccagtatccgagattgggtgggaaacacctccgcctgaatcccctcggttagggggcagcacctcagaccccccgtcatcgcagtccttctccttccacagagaccggaaaagcatccccctcaaaatgtgctacgtcactcggagtatggccttggccgaccctgagaacaggcagcttgaaatccactctccagatgctaagcacacggtgatcctaaggagcaaggactcagccacggcccaggcatggttcagtgccatccattccaacgttaatgacctgctgacccgagtgattgctgaggtcagagagcagctggggaaaacaggcattgctgggagccgagagattaggcatcttggctggcttgcagaaaaggtgccaggggagagcaagaaacagtggaaaccagccctggttgtgctgactgagaaagaccttttaatctatgacagcatgccacggaggaaggaagcctggttcagcccagttcacacataccctcttcttgccaccaggctggtccattcaggtccaggaaagggatcaccccaggctggtgtggatctgtcctttgcaacgcgaactggtaccaggcaagggattgaaacacatctcttcagagcagagaccagcagggacctctcccactggacaaggagcatagtacagggttgccacaattctgctgaactcattgctgaaatcagcactgcttgcacctacaaaaaccaggagtgccgtttgaccatacattatgagaatggattttctattaccactgaaccacaggagggtgcctttcccaagaccatcatacagtctccttatgaaaagctcaaaatgtcttcagatgatggaatcaggatgctgtatttagattttggaggcaaagatggagagattcaactggaccttcattcctgccccaagccaattgttttcatcattcattccttcctgtcagctaagattacaagactgggcttggtggcctga

SEQ ID NO: 732 - protein, 538 aa, Homo sapien [sequence omitted]

SEQ ID NO: 733 - DNA, 1867 bp, Homo sapien
  unsure 1630, 1826: unknown base
gtttcataatacagcatggtctggtagtttgcaaaatggtgtgcttttggggagatacactagcaatttttttaaaaaatggaacagtgtgataggaagcctgctggatgatttcttaaatattctaaaatgtaagtcaaatatgttttaataacaaagacttaaatggcttttctccctagagactgaaactagtattcattgtgttcagaacttaattgggcttgaactgagatttaaatctaataaacaagttaataaatgtgtatgttttgttgtgggtttggtagtgatctgtggttctatagggtttaataggaattgcttttgatttgtttctggctttagaatgtgaggcaaattttacattcttggttctattaagattttcttaggcatgctaacatgccaacaaaaagccatgtaagtattgtataaaaagattcacattgttaatttagccattttgaaattcagatgagtgagcaagttgataatggcctcatctctgacctgagaaaaaacaactttgacccttgttcttaaaatgctttaaccttgaagttgcttgagacttaagaggtcatgttgctttaggtttaataaatagccttaactatttggaggggaaaaaatgggtccacttttttttttttttggcgtttgcatgtacaactttctatttttagcctatatttggaaagaaagcacttaacattttaggaattctttttaaagctgcttgcaaagtgttggtgattttactgaaaacttttgagatcttcattttacaggcagacctgtctaactacaagccagacttgggttttctcctgtagtttgaagacacactgactcctgacaaaatgcagcctgcaacttcctggagaacaactcagtgtcacattaaagtttattatgtatttaatgatacactgtttaattgacagttttgcatagtttgtctaactttagagaattaagagcctctcaactgagcagtaaaggtaaggagagctcaatctgcacagagccagtttttagtgtttgatggaaataagatcatcatgcccacttgagacttcagattattctttagcttagtggttgtatgagttacatcttattaaagtcgaaattaatgtagttttctgccttgataacatttcatatgtggtattagttttaaagggtcattaggaaaatgcacatattccatgaattttaagacccatagaaaagttgaagaatgcttaattttcttatccagtaatgtaaacacagagacagaacattgagatgtgcctagttctgtatttacagtttggtctggctgtttgagttctagcgcatttaatgttaataaataaaatactgaattttaaagctgttaagaaattgtccagaacgagaatattgaaataaaaacttcaaggttattatcgcagtttttatggcgtttttgttttgtcactacagatggtctaaaggttacttattaattaattggggaagtggagacaaggaccaaagtttatctggattttcttatttaatcttcattacctgtgaaatatgtatttgtattcttactttacatatgagatcagaagttcattttcaagcagantggaaaggtggtaaatggactctgaattaaaatatgtcagtattttaaaaggttatcttctgcctagtatttttatggaatctgacaagttctcagatcacacttgtttccttaaatcttggtaagtctgaagcattcttcattttgtttatattatacacgttagtaaggtgggagttcttttgttttttgtgtnttttggccagttgataacatgaaagtttaagagaggaggcc

SEQ ID NO: 734 - protein, 49 aa, Homo sapien [sequence omitted]

SEQ ID NO: 735 - DNA, 2113 bp, Homo sapien
gtgcggttgggaacgcggagcggacggattcgattcaacggggttccggaccgcgctgcgctatggagcaggtcaatgagctgaaggagaaaggcaacaaggccctgagcgtgggtaacatcgatgatgccttacagtgctactccgaagctattaagctggatccccacaaccacgtgctgtacagcaaccgttctgctgcctatgccaagaaaggagactaccagaaggcttatgaggatggctgcaagactgtcgacctaaagcctgactggggcaagggctattcacgaaaagcagcagctctagagttcttaaaccgctttgaagaagccaagcgaacctatgaggagggcttaaaacacgaggcaaataaccctcaactgaaagagggtttacagaatatggaggccaggttggcagagagaaaattcatgaaccctttcaacatgcctaatctgtatcagaagttggagagtgatcccaggacaaggacactactcagtgatcctacctaccgggagctgatagagcagctacgaaacaagccttctgacctgggcacgaaactacaagatccccggatcatgaccactctcagcgtcctccttggggtcgatctgggcagtatggatgaggaggaagagattgcaacacctccaccaccaccccctcccaaaaaggagaccaagccagagccaatggaagaagatcttccagagaataagaagcaggcactgaaagaaaaagagctggggaacgatgcctacaagaagaaagactttgacacagccttgaagcattacgacaaagccaaggagctggaccccactaacatgacttacattaccaatcaagcagcggtatactttgaaaagggcgactacaataagtgccgggagctttgtgagaaggccattgaagtggggagagaaaaccgagaagactatcgacagattgccaaagcatatgctcgaattggcaactcctacttcaaagaagaaaagtacaaggatgccatccatttctataacaagtctctggcagagcaccgaaccccagatgtgctcaagaaatgccagcaggcagagaaaatcctgaaggagcaagagcggctggcctacataaaccccgacctggctttggaggagaagaacaaaggcaacgagtgttttcagaaaggggactatccccaggccatgaagcattatacagaagccatcaaaaggaacccgaaagatgccaaattatacagcaatcgagctgcctgctacaccaaactcctggagttccagctggcactcaaggactgtgaggaatgtatccagctggagccgaccttcatcaagggttatacacggaaagccgctgcgctggaagcgatgaaggactacaccaaagccatggatgtgtaccagaaggcgctagacctggactccagctgtaaggaggcggcagacggctaccagcgctgtatgatggcgcagtacaaccggcacgacagccccgaagatgtgaagcgacgagccatggccgaccctgaggtgcagcagatcatgagtgacccagccatgcgccttatcctggaacagatgcagaaggacccccaggcactcagcgaacacttaaagaatcctgtaatagcacagaagatccagaagctgatggatgtgggtctgattgcaattcggtgatgacttgttcatccccccttcccttcgccctcatgtggaaagaggagctgggaccgcggcgagcagcacggagcggaagggagagcaggggagagaaggcctcatctctctatatttatacataaccccggggaagacacagagactcgtacctgcgctgtttgtgccgccgctgcctctgggccctcccagcacacgcatggtctcttcaccgctgccctcgagttccatgtctctttcccctgcccctagttgctgtctcggctgctctcccatagttggttttttttttatttggggcagtgggcatgttatggggaggggagggggttcttccagcctcaggtcccagctgtctcacgttgtttattctgcgtccccttctccaataaaacaagccagttgggcgtggttataac

SEQ ID NO: 736 - protein, 543 aa, Homo sapien
MEQVNELKEKGNKALSVGNIDDALQCYSEAIKLDPHNHVLYSNRSAAYAKKGDYQKAYEDGCKTVDLKPDWGKGYSRKAAALEFLNRFEEAKRTYEEGLKHEANNPQLKEGLQNMEARLAERKFMNPFNMPNLYQKLESDPRTRTLLSDPTYRELIEQLRNKPSDLGTKLQDPRIMTTLSVLLGVDLGSMDEEEEIATPPPPPPPKKETKPEPMEEDLPENKKQALKEKELGNDAYKKKDFDTALKHYDKAKELDPTNMTYITNQAAVYFEKGDYNKCRELCEKAIEVGRENREDYRQIAKAYARIGNSYFKEEKYKDAIHFYNKSLAEHRTPDVLKKCQQAEKILKEQERLAYINPDLALEEKNKGNECFQKGDYPQAMKHYTEAIKRNPKDAKLYSNRAACYTKLLEFQLALKDCEECIQLEPTFIKGYTRKAAALEAMKDYTKAMDVYQKALDLDSSCKEAADGYQRCMMAQYNRHDSPEDVKRRAMADPEVQQIMSDPAMRLILEQMQKDPQALSEHLKNPVIAQKIQKLMDVGLIAIR

SEQ ID NO: 737 - DNA, 4932 bp, Homo sapien
gcgcggcccgggcgcggggcggcggcagcggcggcgcgcggggaggcggggaggcggggggcccggccggacgcccctgcgccccctccccgcgccccggccgagggcggagcgcgctggccctgcagcctccggcccgcccccggcccgccgcctcccccgggacgtgggacgcgggcgcaggcggggtccgcgcggcgggcggcgggggacgggcggagtcaaaagtctattgaaaaagcagagagagaatgcctcggtgtgtaagtggagtgatgaggacctgatctctgggccgtgtgggaacactggctgccatttcatcacagtcaacctggactcacagaatttcaagagcttgtcggttgggtcaagaatgaacctacgcatgacggcgtgctgatcctgggtttctagtcatcctttttaagctgcaaagaagcatttgcagacgttgtctcatgggtaccgcttgccaactttggaggatgtgaagccggtagagaaataaagcatcgcccctctgcgcgcccctccccgtctgctagaatgtttctcatgaacgcttctccagtggttgctctccagtccaaatgggaggcctttggcccgccagggagctgtaggttccccaggtgcttctcggaggctgacgagggcgtggagagcgcgtcggtgagcgcccgggtgcagatgcttatcagcactctgcagcgcgacggggctgctcggggcaccagcgatgagcgcgccgcacagaggggccacagggcagagggatgccacgacgccaggccggctgccaagcccaccgtgcacaaggagccacccgcgttggctgtctgtggtctcgttgctgactttgaccccatgggggaggaggaaactacagactttggcccgttggtgctagattcagacagtgatgattccgtggacagggacattgaggaggccatccaggagtacctgaaggcaaagagtggagccgcacagcccggggccggcggggcccagccaggtgcagcccagccttccagggccgcaggcggaggcagtagatgtaagccggaaccggctcacggcagtgccccgactgccctgtgtcccccaaaacttgtacctggatcaggtggtggccccggcagccaggtgggatccagcaaggaccagggctccgcctccccggtcagtgtgagcagcgatgactccttcgagcagagcatcagggcggaaatagaacagtttctgaatgagaagagacagcatgagacccaaaaatgtgatgggtcagtggagaagaaaccagacacaaatgaaaattccgccaagtcactcttgaaatcccaccaagagccgcctacaaaggtggtgcatcggcagggcctgctgggcgtccagaaggagtttgccttccgcaaacctccccggttagcgaagatgaacgtccagcccagaagcctcaggtccaaggtcacaaccacgcaggagaacgagggcagcacgaagccggcaaccccctgccgcccttcagaagcagcacagaataaaggtgggatcaaaaggagcgccagcgctgcaaggaggggaaagcgagtcatgagtgcggcacaggcgtccgaggcgtccgactccagcagcgacgatggcattgaggaggccatccagctgtaccagctgcagaaaacacgcaaggaggccgacggggacctgccccagagggtccaactccgagaggagagagcgcctgaccctcccgcacacagcacaagcagtgccacaaaaagtgccttgcccgagacccacaggaaaacacccagcaagaagaagctagtggccaccaagaccatggaccctggtccagggggcctggacactgaccatgcccccaagctcctgaaggaaaccaaagctccacctccagcgagccctgcttccaggagtgagtttgtggaacggtcctcgtgccgggcggacacatctgctgagctgatgtgtgcagaagcaatcctggacatctccaagacgatcctgccggcccctgtagagggcagtgacgggtccctgtccgcaagcccactcttctactccccgaacgtgccttcccgctctgacggcgacagtagctccgtggacagcgatgacagcatcgagcaggaaatccggacatttttggccctaaaggcgcagtcagggagtttgctggccagaggtgagagctgcccgcaggctgcccagggtccacttttgccgcctggcctcaacagccagaccggcggccacaagacccctctctctaaaacaccagacccactgctgggctgcaaaaggaagcgtagaggtggtggccatgtgaggccatccacgcccaagaaaatgcaggaggtggtgaaagacggtagccaggatgccgaccacagccaggggagagctgagcccggccatgagaggcgagacctgcccatccagggcaaagccagtgaggccctgggaggggagggcaccgccaggggccctggcgacactcgcatgtcacagggccagggtaagacagacgaggcaaggcgcctagacgagaaagagagctctgaagacaaaagcagctccctggacagtgacgaggacctggacacagccatcaaggacttgttaaggtccaagcgaaagctcaagaagaggtgcagggagcccagggctgcgtgcaggaagaaggtcaggttcagcacagcccagacgcacttcttggagcagctgggcgggctccggagagactggaaagacaggggcccgccagtgctgaagagctgcctctccaagtccaagagagacagtggcgagggtcctgggaagaaaccccccagtgtctttggcagcacggcagagaggatgaggcaggagggtgccgcgagccaggacgcggccctggccttccgggtgaggagacccgcctccgcctctgcctccgaagggaatccattccccagggagtcccagggcccagctcccagccccggctccctgtctgatgacagcagttcagtggacagcgacgacagcatcgaactggagattaggaagtttttggcggaaaaggccaaggagtcagtgagcagttcagaagttcaggcagagggccccaccgctcttgggacagggggcccagccaggccagaggtgctgtgcaggaaggagccggccccaccgcctggcgtgtgcacacgcagccagagggccaggggggtcccacatctggccgaagggcttcgaggcacagagagcgcaggagcacagggcacagctggtctgttcagccagggcgggaaggggctccctgctgctcctgcccgaggggatccggtgccgcccaggagcaccagcggcggtgtctccgccaaggggctctcagtgagcaggagaaatgtttacgttcacaaagaccagagcccacgaggggctgagcctgctgccaaaagtgcttttggtcagctgcccagctgtgccacagcgggcaccgaggcaggaggcgccagaggaacctttcacatgggctgcgggagcccgagcttcctgacccccagcccgggagcggagagggacgctggagcccaggccgaccgcacaccgccctggagcgacttcgcccaccagagtcggctgcccagcccgtgggtgctgcgctccgaaggcagagatgcagtgtggagggggggcgtcgggagcgagagagacaaggggtccgagggccccgcccggggcctgcccagcctgccccttgcgggcttctcgccgctgctgtccacccagctcttccactttggaaagggtgtctcctgggggggcaggcaggctggcctcttcagcccccacctggggctgcctctgcagggcccctccttctcggccttcagggaggcccaggccggacccagccctgtctttggaagcccacacttgctggcaaagaaggacggcggcccctggccaaccaggaaggcacaggcagggctgagtttgcatgacaggaggagctcgggctcggaggaaagcattttagacctgaggtatcgacgaagggtcaacagggatgaccaggagcaggacgccttgggcagtgacgccagtgacttcagcgacacctccacggaggacagtggcggcagctcagtagtgaaggtctaagccctcgagctgtgggttcgcgtcctgggttgcgtgcattcgtggaaagcggcgtagccgtgcgtgtgtgtgatggttccgtggctgcaaggaagggaaacagtctattatacatagccctgtatatatgtacaccaacatgaaacttttatttaacagacgtgtcctggtaaatatgatttttgtagctttttgtaaattatttaaagtgatgtaaaagatatttttggaaaatactgttgttcaattttgtagggtgttcctaactgcagttttctgtgttctgcatacaagtcttagcttaggaaacatttggttcttaccatcacagccaggttcacagaggctctgatgctttttggttgattgctggtgagaatggccggcggtggctgcagtggtagcctgaggaaggccaagctgccctccctgggaatcactcagatgccccaagatgtccgttgggaagctcccaggacagcactttttatacagaggacaccgcctcggccccacgtccttagaggccagagcacatctgaaaactgcaatcacagccgtccgctggaaaaacgtttcgaagcacagtggccagcgagcgagcacgtggctactccctgttgcatgtcaaatccacacagatgtcagcggcagctgctcggcagcccagccctgggcctgggtgggttcatgtccaatcttgttcgatcactagatgattctaacatcgaaataaacctctttttatatggc

SEQ ID NO: 738 - protein, 1209 aa, Homo sapien [sequence omitted]

SEQ ID NO: 739 - DNA, 2286 bp, Homo sapien
attttgactggcaaaatgtggcagatttcagggatgcaggtggatccttaactgaggtcaaggtggaagaggaagaaagggatccgcagagtcctgaatttgaaattgaggaggaggaagaaatgttgtcatccgtcataccagattccaggagagaaaatgaacttcccgatttcccccacattgatgagttttttacccttaactcaacaccatctagatctgcatatgatgagcctcatttgctcgtaaatattgagaaacagaaactagagttggaaaaacgacgactggatatcgaggccgaaaggctgcaggtagaaaaggaacgcctacaaatcgagaaagagaggctgcggcatttagacatggaacatgagcggcttcagctagagaaggagcggctgcagattgaaagagaaaagttgaggttacagatagtcaattcagagaaaccgtccttggaaaatgaacttggtcaaggagaaaaatccatgcttcaaccacaggacatagaaacagagaagttaaaacttgagcgagaacgcttgcaactggaaaaggataggctgcagtttttgaagtttgaatctgagaagctgcagattgaaaaggaacgcttacaggtagagaaagacagacttcgaattcagaaagaaggacacttgcagtgatttttccaggcttccatttagcaaatgtttgaaaactctagatttttctcatatcaggtgatataatgatggttgctggattagctgtggtttcttgtctaatgtcagtgttcagtaggaaaaagttatatgtggataactgtatgcctaagtagtatataaaagctgtgccctagcgtaaacagtatagcagaaacttactgtgctggactctttaccttataatattacatagagtcttgtattgtctgtgtacccagagtttacaattatgtccatataaaattctagcccagaagttctcatctggggtagattttggccttcagaagaccaatttggtgatgtctggagacatgttgggttgtcaaaactggggtggggaaaaggttgctactgtgcaatgcatacctcctcaacacccccccacactcagtaaagaattttccaacccaaaatatcattagtcctgaggttgagaaaccctgtcctagcctaactgtatacctctatagctatgttttatagttttagaatattaaaacctcagatatttatgtgggtaggtacttaaatggccaaaaactttaactatgaaatgttactgtgtagtatattgaatataggaagtgatgaagattataggtattttattcccatgtttccatctataaatagccttctcagattcagaaaacaatacagagaacatcagaaattttctaaaatgggtcactttgaaaagaattctttttctcactattaatgctttagaagcaagacgcaattttaaagctttagttccttttctttcagtcattgtcttagtttgggtacaaaaatgtcatttcagtaatgtactgaaatcttataagtgaatagttgaagctagtaaaaatgataccagtataaaaatggtacttgtagtccatgagcttgaacccaatgactgattgtttgacttttaaaataagtaatagcagccatttgggagtagggggtaggtggggaagatgtactccgtatcaaataataatgatgttgaaataatgatagtaggtatgtattatggattggagaagcacttattacactatctaacctaatatgtagaacaattcttgagagttgtatctgtcgttatttctgaatgtgaagctcagagaagtgacacagagtaaatggctgatcttctatattgtagtatattttgtccttccctcttccctgaggaacaaagcacgtatctttagtctctttgatatttattctgagaccaagggcttgcttgacctgatgattttccttcagctctctgaaggtgctttttccacaatccaagtgattctgatacacactaaagttgagaatcactgcactagatcactttgtgttttctgattttcaaggttgatacgtagctttaatacagctcctctgttgacagttattactttaattttgcatttgttccttgtaagaatggctggaaactgtgtgttgacatttgaggatgggtatgcaaggaaaaaatatacttctgtttacttactctgactttgaaatagtgttatttttctatatctgaaataaatgcttctaccatagaaat

SEQ ID NO: 740 - protein, 183 aa, Homo sapien [sequence omitted]

SEQ ID NO: 741 - DNA, 1527 bp, Homo sapien
tgcgggcgcgaggttcccagcaggatgccccggctctgcaggaagctgaagtgagaggcccggagagggcccagcccgcccggggcaggatgaccaaggcccggctgttccggctgtggctggtgctggggtcggtgttcatgatcctgctgatcatcgtgtactgggacagcgcaggcgccgcgcacttctacttgcacacgtccttctctaggccgcacacggggccgccgctgcccacgcccgggccggacagggacagggagctcacggccgactccgatgtcgacgagtttctggacaagtttctcagtgctggcgtgaagcagagcgaccttcccagaaaggagacggagcagccgcctgcgccggggagcatggaggagagcgtgagaggctacgactggtccccgcgcgacgcccggcgcagcccagaccagggccggcagcaggcggagcggaggagcgtgctgcggggcttctgcgccaactccagcctggccttccccaccaaggagcgcgcattcgacgacatccccaactcggagctgagccacctgatcgtggacgaccggcacggggccatctactgctacgtgcccaaggtggcctgcaccaactggaagcgcgtgatgatcgtgctgagcggaagcctgctgcaccgcggtgcgccctaccgcgacccgctgcgcatcccgcgcgagcacgtgcacaacgccagcgcgcacctgaccttcaacaagttctggcgccgctacgggaagctctcccgccacctcatgaaggtcaagctcaagaagtacaccaagttcctcttcgtgcgcgaccccttcgtgcgcctgatctccgccttccgcagcaagttcgagctggagaacgaggagttctaccgcaagttcgccgtgcccatgctgcggctgtacgccaaccacaccagcctgcccgcctcggcgcgcgaggccttccgcgctggcctcaaggtgtccttcgccaacttcatccagtacctgctggacccgcacacggagaagctggcgcccttcaacgagcactggcggcaggtgtaccgcctctgccacccgtgccagatcgactacgacttcgtggggaagctggagactctggacgaggacgccgcgcagctgctgcagctactccaggtggaccggcagctccgcttccccccgagctaccggaacaggaccgccagcagctgggaggaggactggttcgccaagatccccctggcctggaggcagcagctgtataaactctacgaggccgactttgttctcttcggctaccccaagcccgaaaacctcctccgagactgaaagctttcgcgttgctttttctcgcgtgcctggaacctgacgcacgcgcactccagtttttttatgacctacgattttgcaatctgggcttcttgttcactccactgcctctatccattgagtactgtatcgatattgttttttaagattaatatatttcaggtatttaatacgaaaaaaaaaaaaaaaaaaa

SEQ ID NO: 742 - protein, 414 aa, Homo sapien
MTKARLFRLWLVLGSVFMILLIIVYWDSAGAAHFYLHTSFSRPHTGPPLPTPGPDRDRELTADSDVDEFLDKFLSAGVKQSDLPRKETEQPPAPGSMEESVRGYDWSPRDARRSPDQGRQQAERRSVLRGFCANSSLAFPTKERAFDDIPNSELSHLIVDDRHGAIYCYVPKVACTNWKRVMIVLSGSLLHRGAPYRDPLRIPREHVHNASAHLTFNKFWRRYGKLSRHLMKVKLKKYTKFLFVRDPFVRLISAFRSKFELENEEFYRKFAVPMLRLYANHTSLPASAREAFRAGLKVSFANFIQYLLDPHTEKLAPFNEHWRQVYRLCHPCQIDYDFVGKLETLDEDAAQLLQLLQVDRQLRFPPSYRNRTASSWEEDWFAKIPLAWRQQLYKLYEADFVLFGYPKPENLLRD
